United States Patent Application Publication US 2019/0183130 A1 - sequence listing, part 18

SEQ ID NO: 2 - DNA, 21303856 bp, Cryptococcus oierenis (residues 13,557,006-15,493,720 of 21,303,856)
caagcacgcgcaagtctggggcacttccgtgcgacatcctggacagaaggtcgggttggagtgagtagtcggcgtcagagcgcacggctcagcacgcgtactaatcggcccgttttgttttccttttcagccacgtacttgaggacgaagacgtcgttactttcttcaggcgatagaatgccgcacgcacgaggcgtacttgtatatactgtatcaaacgcatactattaattgaagactacgaaccgcggatcaacgtcggcaggttttcgtttcgcattgtcgttccttttacacgtcacgtcgcgaatgttacacatcgactaattgcgactaatgtaggtttaaattgttaccgtcaagtaagcaagattcagattgcgagaagcgcgaatctgcgctagcgattccaggtctactagcagtctacgcttctgatcccgggcattgtccgggcatgatctgacctacgcagcatctcagcgatcagggcatgcaccggggtacccggagtgaagaagccacttctagagcagggctatgctaaagaagaccaccctcgattctgtgattctagagagttttaacaaaggcgcaccgcagtcggccgttgtcggctagacagttcgaagctcaacatcgacctgctagactttgagctatacccgtccggctatcaggattctctcgtcactctgtcgggagctttactctcgctctttgcaatcgtagccttgcccgagcgcggcgatgatgtatttgcgtacgccgagctgaggtcgaattcgggtgaatgttggcaccgtggcaccggaggcaacgggttcagcttcccgttggccagatcgagatagacgaggtgataacgagggagcgtctaatcgcgaggacgatgggtgcactgcacagcctcctaccacatcctggtccacaatcgctgatcgcagttgatacagcgagcttgaaacctacgggcttcacatatgaaattgcgcttgtcaaacctctagcgtgcgaccggttcgcttgcgcgaaaaaatgattggcgattgctctgtgcctcgcgagccaggcgaatttcctgctcgccgaagtgatcgaccgcagaaatggaacttttcggtatctcgtccgtttggtataagacgagaaggtcccgaaggatgaaacgcacgcagccatgtctaaggttcttcagcccgtatggccccctgaattggcgttttgaccagatcaccttgatcgggctgtcagctttgtgccagtaggttccctgttcttctaaaagaggatcggatcgatcagcattcgagatcctgagacgtgagacatacacctttgggtttgccatcttggaagaaaggcggattggaggatttggaggcgggggtgcggcgtatttcgagattccacatcggtacactggcgctcggagtgagcacgcccaggtcaaagctttttttcccttcctcctgcccttctcgccttgttttccatcgtcgaccctcgccacgtttcttgaaaagctcctcgatttcttttctcccctcgtgcgcgcgtgtgcgtgcgttggtcgttttgttcccgcgaacagccctcgttcccggttcggcgcagtattttcgcccggaccaacgcaaagtcgagggagtgaaccgacctcgagggatcgaagtggtgatggcccatgcgaaagacgagacattcgggtggtatggtggctcctgggtcatgcagaaggtatcggagagaggacgacgggtttctccacagtacgaccgattggcccccctcattcgagaccccttggagcctaccttgcgagcgtcgctgtggcccgagtgagcagtagtggtggttagtgtagctggaggtggtatttcggtgtggattgcgcgagggcagatcgttccgcatattccggcctagcgatgtgtcgtgacccaaacatctcgcaattcttgatgaccgtcgaccagtcagcccgagatccatagaaggtcgagcatatgatcgatagccactttcttgtcgcatcgaaagtgatcgcctagagcagactagaatcgctctgtgtccctccccaaaatcaaacacgtccgttaattacggtctacctctcgctctacacgcgccggagtcgctccttcgtcatattcttcgatatatcctcatatccagaaaacctatcggtattcacgagcgaccagggtatcttcagcggtatctcaatcaagcaagacctagtcgttcagttgacctagatcaatcgggttcaaagcgattcctacacttcttcatcttactgggcctctcttacgctggattctgttctcggaccctctcggttactttggaagagaggagagagagaattgcactggaagaagagaaaagaacaggaaaagtggcccgacgtcgatcatcatcggccaaagatcaggtgacgaccccacacgtttcgacttgtgacccaaaccaactggtcttggcgtccaggtcggctgtgatactttcgctcgacctcccaaccggacgtacctcggttgaatcgagtcgatatccgtcactctgggagccgacaagataatcctctcgaggcttagctgatcgggataataccagcgaaaggcgattggacggctacgacattgtcgtcgactctatccctatgttccacggtgccaacctcggatataccaacgactttttgcccgaacaagaggtcgccaggaaagacgtcgttcaccaggacatttcagatatttcgctggacatctcagagtttgctaaacatctcgaagccaagaacggtcagagcgaaagtggtcaaggagacgacggtacaagaggaggattgtttgactttggtttcaacggagacatcctgtctccaccttcacctgcaacgtgagtcgtcaaggctgtgtgatgatgtgagacccatcgcaaggccggtactgatgtcatatttccgcttggtattgacagcatcgcaagcactaccgacatctcggggggcgactacctgccccctgacacgatctcctcgcaacgttcgtccatctcgaacaacgacgccaaccctggtcccaaccagatccaccgggcccgtagcgtctcgcaacccactaccttcgctcaacgcaagagcaacctctccttgtccatcccggcactccctgcgcagcaagaacacctacaccacactcagcaccagtgggctccatcgttcgatgtgagcacgtaccgcgtcaaccccatgacgggattcccctccgcatttccggacagtccggcggcggggatgatgcaccaggactacttcagtatgccgctagccgaggggaccgatgccatgatgtcttcggatcaagaccagaccatcaacgccaatcacctcgcttcgaagtcgatgatggatgttcgctacgggtacagattaccggcctcgcaaccttcttccccggtaagaagtggataccccccggggcaggcgccgtatgctggtcatcacgtcgctcaggggaggccgagagggtttacgacgagtgacgtgcaggggcacgcattctttgcaaacatgggtcattggagaggacagggagagcagggcaacggttacttgcagaacctgcaaccgagctttcaacagcagcagcctccgccgccacagcagcatcaacagctacatcagcacctccaacaccagcagcagcaacaacaacaacaacaacagcagcagcagcagcagcagcagcagccacaacaacaaacaccgcaacctcaaatacctcagccgcaccccactcctcagccacaacagcagcaacaacaacatcagcagcagcagcaaccgcctcaatcgcctttcaactacagtccgatcgagcctaccggctatggcataccccaacccggatcagtggttggcactcctcagtctactcagattgtcaccatgccaagtcttcagaacgggacacattcgccgttcgcaaccatgctgtccattcctgcggctcagcagtcgcctcgtagccctgcacccatggggtcacaacaacagacttcccttcaggaggcggtggcccagatgaaagacgctcatcacaataataccactaccaataaccctggtagtagtctaggtaatcctcaaaacctgaacttgcacttcaaccaacccacccctgtcaactaccgaatgatcagcgaaccggtctcacgcaatccggtgccgcatctcgagaatcaagcaatgtcgtataatctcggtggacaggatatacagatggattctcaccctgcgccagcgccagtgtctcaagtgccttttaccccttcggcgcccgcttcgatctcgggcatgagtaattcgatgatggacgagagcgtgttggacgcgcagacgcggagcctgattatggagagtcggagatcatccacctcggctgcacctcagaacatgaccggtttgagcactcctgcgccggccccgatatctggattcgcaatgagcaacagtggagcgatgacacctgatatctccaggcaagtgcaggaaaagctcacgttccttgacaagtaagtcaagttctcttggcgtatggtaaccacatcatttgagtgtaaaaatctgaacaactgaattcttgatccatagtctcgccaactcggtcgctcaagccaggcaagagattctcctcggccacgccaacgcggccgacgagtacatcaccgatgtcggcaatgccatcattgaaaaagcactttcacctgaaaacattggtaatcccacaccgtcgttgaacctgcaattgccaggtctgggcaatttggtgcaagctcagcaagctcctcaacttgcaccctcgccagccacatccttagcaatgacaccgatcaaccatggttcgacacccaatcctccgagctcggatcctcccgttctcgcaccagctttcgaattgaaacggtcacggagtgtcaagcgttctgcgccagagtctccactgctgacaaatgcgcaggccatgaacaagcacatcaagctcgatgatctcggtcccggggaggtagtgtcggctccagtcagcgcaggacctggaaccccggtcccagggcagatggtgcattctcattcctttcccgatggtcatctgagcgccatgaacactcagggcctcggcgggggttcggcacacaatgctggaacggcacctacagcggccagtaacgctttactcgctgctcagatcgctagccggccaacaacggtgccctctccattaggccatcctgctttgcagatgaatatcgacgctcccttttcgcatgcccagatgagctctttttctactccacgcatggaaaccgttccacccaattgggaattccagcccgatatggcatccaacgagatgttgctgtctgcccagatggcagccttcggtcaagcgtccggatattcgaacgctcaacagaccacctcttctcgccgaggttcgatcgtagacggccggctcatctctcaccgacctagcctttccgtactgggtcatgggaccgagggtcaaaccacgagtacgcctgtcgttcccactttggctagtgcgggccattacagcatgtcggggacgctagccatgagtaccgcaggcggtagcacgtatcaacaaggagatggagacgcgtcgcaatcggcaggaaatagtgcccgcaccagcatcgtaccgaacaatgcttttatgggtgatattgccgatggtgacagcgactcagacgacgaaggcccatctcggaatctcaagcgaaggcgaagttcagagcatgtcgcgctcatcccgggcacgctgacacaacctccagacctaatctctcccgagatgcgagcccagctggatatcattctgaacgactttctcaaccgcgtttgttcggactgtgagttatgacctttccgccaagcaggagtcggttgctgatgatatccgcgtctatcacagtggacttccatgatgctaagggagaactgttacatcaggcactgatgccgaagaagatggcgaagctcgacgagtcgccagacttccgaccgttcaaattccgcatccaagcctttacgaacgcgttcgcggaagaggtaagccgacagcacgaggctgctagagcacacgaagcttatcgtctcccatttatagctgcagcgtctgggagtcctcgaagagacgttgtctgcaaagaagataaaatcatatctttggaaccagaagctgatctctcgcttcaacgaagatggcaaaaagtccaagagcaaggggaatcacatctggaatgtggacgcgaagaagatgccggatgggtcgtggatcttccgaccgttcgaaaggaagatcgctccaccaccaccgacacgagcctacatcgggatggcatacagctggacacctcgagtttgggatccccaggcatccactgcggatctgaaggtcaccttcagctccccgcttgggacgttgcctccatggctttcgtggcaagacaacatattggtcggaacaccttcggaaggggctacaactgctcatgtcactgcactggcgacagtaagtcgaaacgctgtcgatcgattcttggacacaatactgaagcgtcggcataccacagtttgcggattcgacaggggtagatcatcagctgtcattatcgttcccagtccacattgctcggccaggcgaagagtaagtttccgtatcagggacatcgttgtcgtcatattggactgacaattcgacgtccgtgtagcagtgttgctggtcccatgttagcaccaagctacatcaatacacagcatccccccctctccgggtcagaagcgcaataccagcagcaggcatttcctcagtgagtcagactaagaacctcgatctcttggacatagctgatgataacaaatgcatgagcagtccctcacaatttccaccaggttggcccatccaagaacttcccatgactgactcggagatgttcctctcgacctcaccggggcacaccaacagtctcctacaatcgataccacaacagtcatacgccacgttcgatcccatgacaatgccacaggtgtccttgcccaatcagttccatccaggaccgcccccacaacaacagtaaatgtaaaggtcaaaatcggcgcagtagtcgaaaattacacacgttgtacatgcctttatccgagagaggggaatatacccaccaaggcccgtataccagccaaggattgcttcgccaagcccccatcaccggatctatgcatattgaatcagcatgatatccagcggaaatgcttcgatcgtatcagacacgggacagacacatgcttcctcactcgttctgcaattcgcttcactatggctaggacggccatcgtcaggatccacaagctatatattccaatcaatcgcatttgccgatttttcgaacattccacctcgatatcaagggagacgacgatgcccaggcggcagatgtgtccgtccaaacagtgatttccaggctgcatcatacgactgcaccattcccagctcagctgttgattgtagcatgacaaagaaacttgcaatgccagtaaagggcgaaccttcaagatcctggttcagcagtatctggattagataccatataccgtagcatcgaaaactcccgtgcttgactcgtgcgttggcgtgcgcgggcttctcctgaccaagcctctgcgtctataactagcgatatacactcaaacccatcagtactgcatgcgggtcagggtatcatatattacgcttttatttcttgattgatacagtgataggaccgaggtccggtgatgatgcctaggtatcagtcacgctatccgtctcgctttccacgatcaaaatcctcttcagaacggcgagaacggccctcaaggctttggtccacgactcctcagcctccgtactttggaccacgcttgttccaggtaccgttccaacgattcccaaggatgacatgcccatattagcggataactttatgggatgtccggcgatcttgtctttggtaatactttagacacaaggaaagggttaactgaaggactggtctggctgataaacaaacgaaagtccgtactctagtccccccgatgcccagccttttttcctggctctaccgtacgcaatgagctgtctcaggcagtcaagcatgcctactagagcgtaattgaaccgcctattctgcagaaggcgcgctgctgaaagatcagtcgaggcgtatctacaatattatcctttcagctggctgctcatccagaaccttgtttcggacctctcacaattcgtagacattctttgatggatgcaattcttcgatgcgcgaaaaagatcccatgggcacgatcttgtacctagaacgacgccgaatcagcttgcatgttcagtcatcttctgagattgggaacagccttacgtatcaaaggtgaatccgaccttatccgatatgcggtgcagacacagcgccaccaatcccaatgcagcgttgatctcgacccattcgacccagggtctccctcccaagcgaagtccgttgattgtccctacggtctgacttgttccgctcgagacggccgacgcccatttatctcccgcagaacctgtatgcgatccatggggtcgatgggaagtatgggagtcacctagcgggacatgtccaatctggaagacatcgttgtagacattcgtactctccaatttccggagcgtttgtgaagccagcagatgtagcgttgtttccgttcgcaattgtgacgcgagctcagtcgcccgagcttgcatcaattgacggtcctgtaggaatctgacaaaaatcgttcatactcttgagcatcgttccacgcgtcgatcgtttcaaggcaacttacctaatctcctgacgttccagttcctcttcctcctgttgcaccttcaatagctcggcatttagcagcctttcctcctcttcttcctccttgagcgcttcgatcaatcgatgagtgttcctttcgagctgtttgttcttggtctccagatccgcatatatctcggcgtccgacttgatgtcgtcgttgggcgcagcttccttctcagccttctttttggcttgccattctcgttcgaacgagatgtaagcgtctctctccctctgtacgtcttcgagtttgtcctgcagaatacgttgcagaaccgaggcacaactagagcacaacggatgatctatcccggtcgaggaagagaggctatacaggagtcgctcgacagtctcggtggacgagatgtcacctggggccgttacaggatctgcacacggcgacattcaactctgtgatcgaggaccgtcaagttctaagatgtgactcaccacgggatccgtccaagctgaactttgagtgaggtgcactcccgacctggctttggctgagcaggatgaatgactctgccggaccgattcgagctctaggcgaatcgtccaacgactgttgcgcttgcaagtaagcatccttgctactccgaggacccggaatctgagcaaagtccctttggttgcttgaggtggatgatgatgagacgctggctcttgaagcatctgagaggtagcggttgagtgacttggtcagctctcctgtcaagcacagcaaggtgtagagctcaccgagaagcgcctgtttctgacccgatgggatcttctctagcgaaggatccaatatgagcggctgtatgattgaagaagtatgagtttgtcgtgatggaaagaagcgatacaatcagactcgcctggtgacagcgctgacaggtaaagccgttcgacatgccgagtcgtcatgagccgccgtgattcagccgtgtccgcactgtacaaagctaacgatgggcgtgcggttcactccagatgagtggagggcccggaactgttccaggatcctgccgcagctttctgtctctcttgtcagcttgcggatcagtgttcaattgaccatccagaatctcgcaagtaccagccgagtactggctacttgtcatctggcgtcactcgaaatagcttccgctctctcgctcaaactcacttgaagcgtacggcaacgaccgaggactcgattcaacttgttgattgactgccttaggtttagagtgtcgggcttttcagactacattccccaggaaaggaaaacgttaaaaaaaactcgccaaaccatgtcttacgtgacgatagagacctctgtaggctcgttaacggtcgagctctacaccgagcatgctcccaaagtgagttcatcccggctacgatccttcggtacaccgtttcttgagcgaaatactcatatctaccctgctcgaatggggtcctctagacatgcaagaacttttcagagcttgctaaacgaggatactataacaatgtcatctttcatcgagtgatccaggtacgactcgccctcgctcgtcgccgagacacttccgcttgacatcgctcgcttccctccacaggactttatggtacagggcggtgacccatcagggaccggtcgaggtggaacgtcgatatatggcgagaagttgtgagtcgatccaatcggttgactgagaaatctgtggctgaaacttcctggtcgatgcaaagtgcggatgagattcaccctgatctgcgattcgtgggagctggtatccttgcgatggcgaactctggtcccaataccaacggtacattcgattgctcttggcacgtgattgatatcggtggattgctgagacccgatctggaaattcataggcagccaattcttcctgacgttgggtcctactccttggctggacggaaagcacacaattttcgggagggtatcaacgggcatgaagacggtgcaacgactagcttccgtacggacagactcgaacgaccggtatgttgctatcatataatacctacttgtatcctccgttgctgactcttatccggacccaacccagacccgtggaagagattaagatccaccgagcgaggcaaggaaatgccgctgctgctggttcggacttggtcaaagttgtagtctagatgccaaattacacaagaactcagttccaggcacaataacaggccccagcttgatttcgatcatcaagaagagctcactgaggctattcgggaggttgcgacacgcctcccctctcgtttattagcagcccatgagtgatatgacctacgattccatgctgctctggtccagtctctggctgcacactatcatgacatatcagtccggcggttccaggatttcgcacgtggaacattaggcactggtcgattccgacgcggtccgatgatttgacagccactcgccttggaaggcttctacacaattctctgcttggaggcggcgccgtcaccatcccccacttaccgctcgtagctgttaactaaatctctagttgacacgctttggctgcgtcggctcgccgtgctcccaacgtcgccatttccttgctgacttgcatcccgtcttcgtcgggctctctcggcttccctttctttctatgttcttgtccttgtagatgaaggtgctcatgaagttctcgagaggacgaggaaagagctgcaagagctcgccactcaaaggtcgcgcgggctgttcccaagattgatatggttcacaatctcaaaacgataatacgtatatctgctcatagagaaaagcagcgacaatgtctgctatattacatctcttggtcattaaggaagcgagacgggccttgctctgcattcgtagggcaaacgggtgcgagaacgaggcgaaatttctaagaaaatcaaatgatagaccgtacgaccggcttgtaaaattgaaggtcatggcagttaggttcaagagggcgtgtatcgcgaatcaagagagtgtccggcggactgcgaggttggaatggcgaaaagagctgacgcgtcgttgcggcagtctcaaacgatctgcaagtagttggatggggcaactacagatatggggtagtcagtccaagtcccggcgcacagatgggttatccgggtactggtcaagcttacttccggtccttccgtctggagtctgacattgccaccatttacccgtaccatcaatgacatcgagtatgtcgcccttgttgaacgagatctcgttaggatcatctggagaggccgtgtaggcgtacagagctctgtgcatccccgaagagcaatttatgagcgactgtcgtatacatgtacgtgtcgtgccaaactcacttggcacgcctgctagatccagactcctgcatcatgcccgactcggccacgccgggtccggacaagatgatgggggcaccacctcccatacccgtggcattcatcttgaccggcgtgccacccgaggtaggtgcaggtgcatacccagctgaagcatagcggtctccgctgccggacaaaatcccgccacctatgctagttccgttcatcatacggcccgaggggtaatccccacccgtctcggctccgtgatacgtcgtcgcaacgccccctgtaggaccgtagcggtgagccgaatagggcgacagaccggcgagaccggtggggttaaggagatggtagaaaaaggtgtcttcctccgaagtcaggtagagaacccagacgagcttttcgaacgggtcatcccggggtgtcttagcatatgtcgggtgtcagagggagtgtccacgacaaccgtgctcacatcggccaaagcgcagagtagccatccagctccgacagccttcaaagctccgctcgagctcaaaccttcccgggcttgaccctggtagatcatctccacgccattctacaagggaagcggagagtttcgcacaaagggggttgtcaaccatcttcaatcggagcgaacctctaacaggaccctgatgaatcactcacgatcgcaaagacgacgacgatggcggtgacgatcgcaatttgccaccgatgcagagccaacgaattgcgagcgagcgcgatgctggaaccgtatcgaatcgccgtcagatacgctccggaccacaacgagatgccgcttgatgcttggccgactcacaagaggtgcacgataatggcgagctggaaaataatggcgaaccatagtgttcccattgaaggcccgccgttcaggttatctgacgggtaccgagaatcaggtgtcagctctgggtacattgacttcttcccgcagcggtttgcacgttgcaaacgtctatactcactcaggtcagattcggccacgcacatagcaataaacgcgatgaaccatccgatgaaggccaggatgaaagttaccaggaataccggatgacgaaatacgatcccggcactaaaaggtacaccatcacagtcagcgaaggtcacggaggagcgcggtagtccccttcaaaacgagatcttctgggtaaaacatctacagctcggggtccatgacatgtgtaacatatctcggtatctctgccatagcttcgattgcggtgttagagaaggaggaacggagatatcactcactcaaaggaccggttccgcatattgctacctcccatactcattccccctccaaccggggctgggcctgcttgacgtcgcttgaacaagggcatgcggtggaccttactgtattatttcgatgcgtattaatatagattgacgctgtgatccgaagaactaaggtcaagatgtacagaagatcaggagatgacgatcaaggtggagttgtcctcgaccgcgaccaaggtgcacagctgatcttttgatgattttgtgtattattacgagcaagtccgacgggcccaagcgaggcgacgcgagctagcgagagcagactggcgcgctgtctggctgttagcgtgatttcttggcgtgtagcctagtcagtcacgttctggggacgaggctaagccttgcacgtggaccgagaaactctatgcagtgtacttgatagtgcgcagtctatggctccgaagatcccttttcagatctcagcgtgaccacgcaacttgccccggctactgtcaagacacatggggtatttgatacaacaaaccagtaatacaacctcgattcctgtcccgttcgcaagatcagcgatcgctgcacctctcaccactgtgaatgcaaaagaaagaacaagcggatctcgtgagtcatccccgccaaaaagccacggaacattcgcccattctgcgattctccggtgcgacccgataactcacataggtcacgtcccgataatccacgactccgaggcccgcttttatccgtctctgtttttcagcctgccacttctcaaacctgtgccgaaacgaaacgggttcgatcagcggaatgttaggccaaattggtgcatagtagtattaggactgaccatcgcttcattttgcctcgactattgtaaagcgaacaaggagctcggagcatcagtcctgctcggcgcgcctcaggctgccaaatgcatgctgttaaactaacctcttctcgttgccaacattgaccgtagcgatcatcttgacatcgggaccaggtacagacagggcgaaacacgtcagttcgaaaaagctcgagtgctccgagtacgggatgcctgcacgtcaaggacgcagattattcaggcaggtaatttagcggacagtcaaggaaggcaaagactgtatcgaagctggacctaccgaagatcataaattgtcgacacgaccccctcattggtcgcaaatattcggcggtgaaggtgcggctctgatcacgtcgaatgacatggttgatgtcaggcatgctctccgttccagcaggcggcgtgtacctttattgagcagagacaggttatcagcttcaattgaagacctcatcacctccttatcgactaacgtccatccggtcgggcgaaaggcaagaactcgatcgaaatggtcacgtagtttgtgaagatacggttcgagccggtcgagttgaatcatttgaagcggcaccaggtggattccaccctgtcatcgtcaatccgcgtgcaattttatcagatctggaacacgcgctgttcatgacagcgactcacctcgaccgggtcacttgtcaacatcgaatgtagttcttcgtccgcttgacacatcaggattcctcgctttcgcgcgtcgcagtagatcttgctcccgatggctcttgcgactcccttgacgatacgctccttgccgatcgaataggtgctgtttgattcggtagcaagtcagcgtcgcatggtctgttaagaatgaccggctaagctcagttgacccacccgatgacaatcaacgttctacccgtctttttcgtcttgacgatgtctacgtcctccttattgtcctcttcctccttgacgagccaagagtccatcaggcgccttcctctctcggttgtatccataccttccaggcctttaagataaggcttgacgtcttcctcgtctgcaagattctcctctcgttttgcgaccccgataccggacacgtccggtggttgtcccattattcctttaccccctccagcatacgtcactgcaggtacgtgctgcccaaagatcgatcgttttgccaacgtcgcacaagcatcaatcacgagcggctggggtgggaaacagtattgcggattcaggtaggtcgtgtccagatagcaagtgtcgatcttcttgcccactatcgctgggtgaaggaccatttgcggacaggcacgaaagtcaccgcagtggaggtatctccatattcgctttccaccaatgtaggggctcttgaatccaaccgagtcgccagcatcaacagtttggcgtccttcaaagaggaacaacgaggatccgggacctgagggatgaaaggctcagtcgaaaggcagctacgggtctgattgaggaagctcacagtggttggcgtgaaggacggtgaccatgactcctccggtatttggaagctcgtaagggacatcccaaggcagcccatgctgtcaccaaagaaaacatcagcacaatcctcgaattaatcggcttaaatgcagcgctacttacaacccatttggcgtccacacccagcatcagcttgatcaaattggcggtcgtttctacggtgcgcatcgttgtctagccacaagattgatacacattgttgttcctcaagactcaccggaacaatagattggtccatgacgccagcttgatgaaaggtttgtgtagtgatccgaatgcgcatgactgttctgacaggatatataacaagggcttcagtaagtttgacgagatgccgcccctatcgatgcccacgtcaggaagtacgccttgaccttaggtatactaccatatcgaaacgcgtcaacggcgatcggcatccctgtcatgaccttgtagaatggcgcctttctccttccgacgacccgctttccatcccgtttgaggtccacctcggcgaccttccattcggcgctctctttgtgtccacccatgagaacggcgaaagcgttcggcttccctggagttgcgctctcgtcagggtcatcctcttcctccgcttcctggattgggttcggagggaagaacgcggaaagaggtcgttttgctttagaaggtgtctttttcgattgtggtttgatatcgtcgtcggcatcgatgtctatgatcgcgtgggtgctaccattgttgtttggcttctttttactcgtcaaagagcctaggcaaacgcccttcggcggaagcccgctgaggtcggtatcctctggatccgcgtcaaaatcgttgccttcgcccccatcatctttcgggtcgtccataccgtacccttcctcgtcgccttcatcccagtcttcctcctcagcttctaaagcctgagacaacttttcgtgttcgccagagttctcaatcggcggtggtgacctggtcatcggtttcgatggtccagcttcggattgtggtaggggatcgaagttgctgagtggagagcggtgtgcactcggcctttccgctaccttgagctgtgcgacagtaggcacggtatgtgattgtcgagggagctttgtagatgtcgactcagatggcagtcctttggattcgagcttgttgacctttcgaacgggcgcgggtgaaccgtcgagtatggtaatctcgtcttcgtcttcgtcactgctaatcaccactggcgactcgtcactctgtcccaccgcacgccctccacttctaggactgagcccactcgatttgaccgcagagacccctgcgaggtcgctcgactttcgggaccggagtgccggcgcgatcttgcgtcgctttgaggtggcatctgcgtcgtccccttgtttggcgaagaaatcgcgtagcgtattcgcctggcccggacttgccgagggcgcccgtttcatggtcatagcagcaggttcgatctctatctctcccgcatcgtgcacaagattccaataccgagtgttcaaggtggtttcttgggcagggggagctgggccaaaggaacaggtaattgagcgatgaacgatatgagcgaggtccctggatgacgattccgatcgatcagctgaggttacgctttgagtgaatcacgtgatcatgtcttaccactcgctctatggaggcggtcggtcaatcaatcaatcagtctaaggtaatcatgatcacggtacgtacaggtctcaatcatgcacctgagcccgctcgccctgctttaatcagctcgctgtccttcctcgatcggaactcctcttgaagaaatgtctttcctattcaactggctctggggagcgtctccagatccccgtgagaccgctcgaaattccatcgttgccctgcgggagcagctgcttgtcctcgataaacgtgaagagcacttgcaacgcaagatcgacgaagaacttgcgaaagcgaaggcgaacgtttccactaacaagagccgtacgtcttcaacctcggacgtctgatgacgcttccaaaaggctcatgcaaaactcatcaacgtccatagtcgctacctccgctttgcgacagaagaaggcttacgaaaccgaactggagcggatcttcaacactcgactcactctttcggcccaagtgagtagtcgggcaaaaatcttatatccacggcgacgtattgatcgtcatgtcttctgcgtatgcaggtggacagcctcgagaccgccaacctgaatgctgagacgatgaagacgatgaaacaagcgtcagacgccatgaaagggatacatggtagactgtgagtcgaacttcccctattgtgcacttcgctactgttttcgacgacatttccccgtctgtagtaacatccaagatgtggacgctcagatggactcgattcgagagcaaatggaggtctcgaaccagatcagcgaagccatcagctcgccacacaacctcggaatcgatatcgacgaggtgagtctgacgatctatttatcgaaagctaccaaggcgggtggttgactctccggagggtctgtgcataacaggacgagctcaaggacgagctggcagagctggaagatcagcaactggaagagaggctggccggagccgaaagggtacccttgcattcccccgtctcaaaccgggtggccgcccctcgaggtaagactgctccaacgctcggcgatattgaacctttgctcaatcagatcacatatcattcacagagcgcgtgtccgaggagcaagaagaagaggctatgcttcgtcaactccaagccgagatggcatcctgagcgactttgcatgcgagcgctttttgccacacgcaatggtgtgagcactccgcggatcccagaccatgacttgggctcctcaagcccgtgtattttttcttgccggaatctggttgtactacctctctacgaactctcgtgatcatgtacgcaggcactataacataaacgagatatcccttaggtgtactcttgcaacactttatccaattcaatttgttttggaaagacgaggtgaagaaccattatcgcgggattggaatcggactttccgagaggtcggtcgatcatggtcacgtgaggcgggtccgtagaaaatgcctgaacacaacaacccggaatgacgattaagatctcatcgtgatgatcaacaagtttacacaagtaatgatacacttgtattcgtatgacctccttgtaataccggttaaattcacttatacacagataccgtgctctgtttggacaagaaataggatgtcatgacgatgaactcctacctcgaatcgcaaattccgtatctacgggccttgcacaactcgctgggcctcgcttcctccgagttggcgaacgacttgcacgggatcgaggaagctatcaaacaggccattgacactagggtgaaaatcaggaaggatgctgtaaaggaactcgaagaaaggattgcgaaggtgcagaaaagggtcggcaagatgagagcggtcttgggcgaggaatgggaggaccagcggtttaccaactcggacctagtaaacgagctcacatacctatctgaaaagcccacacgaagttgaccagattcatgtctccgcagagtctgcctgctaaattgggaagtcttgattcggaagaagcgaggttgaaatcggtacggcgtaggaccaaacgagagaagcccagaggcttgtggctgacttatcccgaaactgacatagacgcatgaggacaggatcatgaagatcaggggtaggtgaattccttactccagcagatcctgaccacctaactaacattccgacgtgtcccatttatgctcagctctgactggacagatcatcgcgatctcgacggtgttgggcaagacttacagtctaccacccgaactgcagctcaaaatgagttcatccgcacattctctacagacgagcgcgccaccaccatattcgaacgagaaacaagaacatacgatcgctctgtgtgactctgcggaagaagaggttgaaaacgcaagtctcggcagaatcgctgcgcttgaagaagctcttcgtctcgttcacctggagaaggtatttctacgcatctgcccggtggaagccatgaaagctgaccgatcgcttgcaaccacacaggtcaaacgaacagagcaattgaacgatctcatggacgatttgcgattcttacacggggagctctgcctacctgcgagctgtgacgattccgcccgagcttcctggttcatctcgggatcagtacctcttgagaaatctatagcccaccttccctacgtcgatgcattcattgtgtcgatcaattcgggagacgacgccgtacaactgttaaccagcgatccgaccgaaagcttgatggatttctgcacaacgctccaagcgacttggttggcagaaaagtcaagacgagaggcaaggatccagaccctttccgacgagatcgagcctatctggttgcgactccaagtctcccaagaggagattcaaacgtttatcgaggaacattgcggcttggcgctgagtacaattcaggcatacgaatcggagctggagcgggtccaaatcatgcgaggggaaagccttggcgggttcattcaagcggtgcgcgaagagattcaaggcctatgggacaggttactctatggccctagaaccatggggcagttcggcgcattctacgatggtgagtctctctcaatgttaccaatcaaatgccaatcaagctgaaacaactggggtcgccatcagatgcgatctcggaagatctactcgcccttcacgagacagaggcgcaacggttgtcagacgagcttgagagcaaaggagccttgctgtccaaggcgcaggaatgggtcgatctcaaagccaaggaggaggagcttgaggtcaagcgcaatggccccgaccgattcaataccagaggaggagctcttttgcaagaagaaaagatgcgcaagcggttgggtatactcaagccgaaggtatgtttcgagggaagaaaagcttgtttattggtgagtgactaacggtcttcttcgacgagacagctagaagccgaattgttgcacatggttccgctttgggaagaggacaatgatctcgatttcctggttgatgacatcagaattgtcgacatcatcacattggaacaggaagccaaggatgcagaaaaagaggcaaagaaagtgagacgacttgcctgccggttctagagcttgattcactccactgatatcctgcaatctgtagcgaaccaagatcatggggcatagtgtaacaccagcaagacagactcgagcccctactgctatgagtgcgcatcgcacccctatggcaagctccataagcgtgtcgagagaggcacccacgcctactccttatcaaaagggacatcgcgtcatgagagttgccaacccactggccagcagcacgtcctctgttcctagctcacagccgggcatgaggaacgtcaacccgcttgcctgcagcacctcgtccatctcgagcatgagtgcaaacgccggtcttcgaaggcaagcccctcctcccgcttacagtctaccacgacctactgctggtcggaactataccatgccgcaagccaagccgctaggaacgtccgcggcccacaacgtcattcagcccagaatcgccactcatggtacgcttagcagcgggattccgaagatcaccggaaataccgccattctcagtcgcgacgggaccagacgacctagaagagaatcgttcaagccccgacgatctgtagtctcgagagtcgactcggttgcttcgactgatatcaagagctggagattggaagatttcgttgaggagttgtaacctcctgctcccaatatcggcgtttcttcgatttttcgctttcgctacagcaagtgccttttatacctaatcttgtagcactgtgctttctcggaagattgtagagagtgagaaagcgagcataaatgttgatacttctggtcatgatggagcacttgacaacatgcatgattccggcgagaacaagccccctaaactgatgaaaatagaacgggaatcaaagaggagccagaggttgttgttgttgttgttgttgttgttgattttgtgaggattgctgaggtatagagtcgtcttttggctggctagagccgaccttttgtacgcactgcatgtctgagtcctgcaagatcccaagacagagaccatcgatatccaggcaaccacacttatgatatagacggcctcttcgtgcccatatcatgctgatctagcctctcgatagcgctacagggcggctcatacacgacgcagacaacttcgacacctatcacttcgatttctttctaggatttcttcgcaacaatgaatacgccgttatcacctcagcgcagtcatcccgattccgcttcctcgagaccaggccaaatcagcaaggcggctttcttccgtgccaaatctcctgcaaacgaggctgcccaagatcggcgggttaacgctttgaaaggcgggtgggcttttccgtcggtagagcagaactcgccggatccgagcgaggacgattattcggaggaccgaaggccctctgatccgtcgatatcgccctctcatggagcgactgtgggacactcgcctcagatacctcaggtctcgagtgaaagcagagctgttcctaccacgctcgatcgtggcatttctcagcggtcgcaatacgaaccatcgattgaccggcggtccagtaacgttggcttccaaccggaagcaggcgtaccgatgcctgtcgctgcacctcctacgccctctcgcaccagcagtcgccatgggcaaagcgatcaccaacgaacgacttcaaaggccaaaagattgcctcagccaccttctgccagatccgacgccggctttcaccgagatccaaacgagcttctgatgacgcttctcgcgggacaagcagcgatggattgccaggggatgccggtgtatcgctgggaggaagttgaggaatggaagaaggagttgaatatgctcagctcccggctggcggcccaggtcgctaagcatcagcgagaacagaagatattgacagcggccaaaactctcgccaagctgaatgttgggaacaagaggatgtctaagcagaccgtagagagtgtagaagtagctgaacagaaagctgcggatgccgaaaaggtgagtgtcctatcgagttcccagctatagggccctggccgaattgattcgagctgagaacgaacgctggataggaaatgctcgtgctgcgggatcgagaatcgggtctccgccggcgactcatggagcactgggcaggtgtcatggcatgggaggtcaggcgactcgaggtggttgtcaaatctgctgaagaccgcgcggcgcgagcgattcaggaagtagaagaattagcagagcttcgagacatcgccagaaaggcagagatgctggaaaacaagctggacaacgcacagcagcagttggaaaacgggagcaagaggattcgggagcgagaagaagaggcagagatgctcaaatcggagctgaacaaccgcgacctcaaaatctctgacctggaaggagccttagcggacttggaggacgaagtcaagatgaagcgaaaggagggcgcattgcttgaggctgagattggtcagcatcggacaagagcaagcgagctggaggatgtgctgaacggtatcgacactgaagctggagtaagggctaagcagctggaactcgagttgcagcaagcaagggaagagcagcataaatggtctgaggagaaagctcacctaaaggaatctgccgaggacggcaagatgaaggcgaacatgtgggagactgcaaagatcagcgctgctcaggccctcggcgttgcgcaggtcgaaaacgtgatcgatatctcggacggcatcaagagaatggtgaataccgtcaaggaccgcgacgaggagctcaaggtcttgaaagaagagatgagagagattagcctaggcttcgaagatgaagtcgcaaggctagccaaagaacgggacggctttagagccaaagccgaagagttaggtggacgatccctaaacgaggagaccgtccgcgtcaagcagacagagcaattggaagcaaaagttcgagtgagccgcagttctatgatccgattgctgcctgagctaacgctcgtgatatatgtgcttgtgcagtcgcatactgataggctgatgatcttggaaaacgaaaactctagtctcaaaagggcattagatgaagccgaaactgtcatacgccagcagaagtcatcatcccctgtcaacgctccttccagtagccatgctgctaaggtcgagactttgagaagggagttagactctcaagacgccttgatggagcagatctgggctcttttgcctgtaactcatgctcgtctccagactgggctgatcgacagaaacaccaacaagctcaaagatcaagtcatttcgccttcagtggacatagatttcgaggcgttgaggaccctttatagttcatcgccaagcccaaacgacgagcgctactccggtcctcaggacattgtcaacaagataaaaatgctgatggaagatggtcaagtcctggttgaaagagtgattcgatccggcaaggagcgtgaactcttgaagagtaacgcgctgagggctcagaagctcgtcgaggaaggacaagcaaacttgaagacatatcagaggtaagcggccagatggcgtgccttttcgcggttatggcacgtctcagtgatcccgactcttccacagacaagtggatatgctggaatcgcggttgaagcagggagcgaccgctggaggcggtcaagagctgtgagtcgaagtcatctgcatggcggggttcatttctaaagtgccaacaatctcaatgtgtgcttagtcaagggcagttgcttgaagcacgagatgcagttgctgagacccgccaggtcaatcagcgacttgagaaagagcttgcggcgcagcaggaacgggtagagcgtttggcggaagcaaacgacattttgtctcagcgagcattaacattagcagacgagatggagcaagaaaagcgtgtcgctcatgctaagctggagaaggagattgagagcttgcggagacaggtgaaggcttcagacgagcgcgtcgatgaggagcgagcgcggtgagtgcctcttactagaactcaggcgcaatggcaaacgtctgacaatcaatcattcaataccttagcgagcaaactcaacgaatacagctgctggacgaattaaactcgctgcagagcgaagtaacccgactgagggctcagttgcgcagcgctcattgagctgggtgtatgagtaccgtcatcgcgatcgtcgctcggatactggttgtatattgcttgccacgttaggctattcggaatccccactataatgccgtcgaactgtcttcccttgctcctagatcatcgaaggctgaagtgacctgcatgttcccggcgaccgtaactgcgttctcgatgaaacgcggcgatttcgtgtctgatcgtactgtgacactaaattccccaaattcgcgcgagactgactaggtacacgatggcttaggtagttgggctggagccaggagagagatcagtcaaggacgtctgatcaggaaaaccgttgatagatgtagccatgcacaggtacggacgttgcggcggtttgatgtcggtagaggaagatggagtcggtgaactcgaggtttgcgcgactgcgccgtgcctcggcgtcggatgaaacatggtaatcttccgcgttgatggtgtccttgtagcgtccagccgaccaatcaggaatcgtttgggggtttcgggattggcttgagatggactgctgaagagggttggatttggctgacgattcttgccaaatagccctccaggaagagtaaacttggctgcacatctaattggcaatttcggtctgctccgggcggactgccgcgatgggagagtggaccatgcttcttctgacgaggctaacacacttcacctcgttatctcggacccaataatcgaacagagcacaaaatcacataccgagttcatcgatcctacagggcaaggtgttccagctgcgttcttcttgcgcaatcttcttcgcgcttgccgcttggaaagcccggcgcgcgatgacttctgacgggactgccaatcggtcggaaggaatctcttgcaaaagctgacgaggttgtgtcattatacggtgtggtgcgacaggatcttcgcgggtaagacttggttgccgctgggccggtgggcgagaaaaggatgcctctttataacttgttcgagaggtgtagaattcggttggcgagaattcgcgcggagatgaaggttgttgggagatgacgctggaaaagggcaagcggacgaagggttggcgactgacagacgaagtcgctcggtcgatatcgaggatatgatcaactttttgatcaccttcatcgttgttgccatcagtcagtcctgggactgcgtgtatgacatccaaatggctgcagaaagcgcgggcctcgtccgaattagtgaataggacactatgttgcatcggtttctcgagattggtgttgtgagccgcttggctgatatctcgttgcttgactggcatggccgatgatgtagccgaacggccagcaaatagcacgagttgctcctttatctggggtgtacttgaatgctcttttttgttttcgctgccggcagcctccattgccttgtgagcatcttcacttcgcccgaggcagatcacttcttcttcactcccggccctactcttcgatagattcgcaccggctcccggtacaaagtcagtcaatttcgccgcagacgtgtttcttgtgattctgttaggcagggctctctgtttttcgaaacccatgacgatcggaaattgttgcgcggcggacgtcttgaggttggctagccaggaaaatcactcagaataagctctggcttgacaagatgttccaaacacctacgcaaagtcccaaatctgatgctatcttcctgattcttcttgttcccgtccggcccaatgcctttgtgagcagtcctgatttctccggtctgttggttcttggttttgctcgattcgtcgacgaaaggtgatggcagagcacgatctcgacagacaggctccgggcgggtgaagctcgatatcttttgttgaatgctcgtttttcttgttcctggcagtcagacagacatgtcagtgcgtgatagggctgcaagctaatatgctttggagccggtcatccggataggggtaatttcggactgaccagtcgtgttgtgattaggtcctaaagctctcatctttttctcaactcgcccatctccggaatcttcacgcaagccgtctggctcgcctacccctatcccactcgtttggttctgggaaacagggcccgcgcgtcgattcagggggacgaaaggcaggtttgtctgtactctttgaagactgccggtggctggcttgttgccggtgtcggttttgcgtttcttccgtttctgcgtcatcaacaggttcggcggcggtcgggctgggtcatgcctcgattccaaatccagctgtgacaggtggcgaatgggggaggaggcaacgagatgtacgatgagcacgatatggtagggtcgccatatcttgatgttatgcaggtaaggttcgtgatgcgatgggtcatacccgtatatttgaagtggaaggctgaacatgagtatgaggacaaacatgtcggagctgttggtcatcattactgacctcttgcatcaaagttctttcgtacgtcttgtggaacgcatttttccctcccgaggcggcgatctttgtgccattcccgctttgaacgccattgttcccttcgtcgccagcgtcggagtcctcgtcgtcggtatcgaatgcgagactcagtggaccttgtttccatccattcatcgcgaggcctacaggtgcggtcattgtcatctggagcggactgatgctgtggagcgaatgggtgaaggtcagaagaaggagaataggaagtcagatctttatcgtggtcgcgatcgccttttgtcgtcactctgcaaagggtcatgttacctaacggtcttgctgaatgaacctaccagaaagacggctatgtcgatagcgaagggtgatcagactctgtcgaaccgagctgcaaggggccatcaacgcaatgaagaggagaatgatcgaatgacgatctgatggtgatgatgagggaataagatgaaacacggtagattctccacgagtcggcgacctcactgctccgccgtcccggtctcgccaaaaaagccacctcgtgatccgtccgcgtcaggtctgcctttgccgcggccggatctcgcgcgctctcctttgcgcgctcgctcgcttcgagggacacgggatcctatcacgtgaatcgggcgtcggcccctttaacctcttcgatccgcgtcagcgcgacagtcgattgctcgctccgaggtgccttttgatgagcgttttcttttgagaatcggattttctgcttccgcgcgtcgagcacgtcgcctctaccgctttcaacaaggtgtggtagggggtgacgaccaccgagggggacatcatgtcgatacttggcagtttgatgtcgaggttccaggctttacacaccgtaacagcaaatcagcatcgcatactgtatcttgatagatctggcaggcccgcaaaggatcgtgaatcacgacgatgtatccgtaccacactccaccctactcgccgcagattccgggggacaacggcgtcgaccgacgatcctctttgaattatcctctacccaacttgctcggtcaaggcggagcgtccccctacctgaacggcagcggcaataatagcagcggcagtatcaacaacgttggaaatcttagtgcaagctcgtctcaataccacgggagctaccagaatggtaatcagaggctcaaccaggaagatcatcaacgattcgttcataatcaaaacgacgtcaaccagcataattttggccggtccgactatcaacacccgtacgcgtctcaacagcagcaccaccgccagcatccagtgatcagctcactgagctcgagagagtcctcagtgggacgtagcggtcctggctcagccgattctcaacagcgcgaccgacagcgttcgactgctttccaggaagacatgtttgccgcggtcaagcgcaaacgaagctcgctgtcggacgagcatgctattaaccttcaacagcaagcacaaggcaacttcggtatgccccgtacgaataacatgactccatattacccaccttcgcatcatgcccagatggacccacccaccgcttcctcctcccgccgaggatccggtcatgctacctcgacctcggatgacgatggtcctcattctcctactgcctcctcttcatccctgaccaagaaaccccgactgatcaaggcttgcgaaccctgccgtctccgcaagatcgggtgcgacggtacccacccggtctgtcagcggtgcaaggccgacaacagggtcggcgagtgcaggttcatccgtaccatcgtcaggagcagtctgacgaggaaacggatgaccgagatcgaagacaagttggacaggtgggagaagctctgggcagggttgacgggtgaaccgaggagggaaggagagatggatccagaggcgttggagcggttagtccgggatcagggaagcaagggaaggaacgtgagggcaaagatcgtcagtggattgggaggatccatggtcgggtcgaatggaaacagcgggaagaaggattgccatgccaacggaatgatggtcccgcctcaagcgcccttatcgatgagcatcacgaacgggaacgggatgggcacgcaatcccagcacaataaccttttgctcgaccctcccgtacctattcccaattatctccatccgaacaatatttccctcccgaccccgctgccatccatgacaacccttccactcaacgtttccctccccaacactgccccatctaccgctcctccatctccgcggaccgccgaatgggcgcagagtcctcagatagacaagaatttggacgggacgggttcgttcacccggagcggtgggagtgggtcctcttatcttggcctatccagcggagtgacttttttgaatgccatcctcaggctgtgcaaggaacgtggtggcatctttatcgacgtagagaataccatgcctgcccctgtacacgctgcgggaccgccttcaacggtggcacttggcttgaaggaaccgaatgggacggctttgggtttggacctcaaggtggtggacgtgctggacgagcctgatcgaggatccggatctccccgtgcagtcgaggctggcgtcggcagagcaaatgaaagtctaagtaatgccgaggtagttgctcgggcaagaagtttgccacccaaagaggaatacatgcctttcgtcgacagctacttcaagtactttcgtaagtcacgccctgccaggacagcaaggtggtcgcgaggctgagccggtcggtttccgtcgatgttatcacagatgggatcacaccaatggtgcatgagtcgacagtcagagccacacttacgggcaggattccatttcctgataatgacagctacctagctctgatttacatggtgagcgtcgcctaaaaacacgccttcacattcatagcgcgaatgcttaggagatgattcgcagatattcgcgatgggcgcgcttgacagtgtctcgcaagaatccgactttcacggacagaaatattgcgacattgctcgtgccatcctgaataatgatatcatggagagcggaagcgtcgaactcgttcaggcaattgccatcttggccaattatctacaaaggaatgacaagccgaatgcgggatacttgtgcctgtaaagtggcctgacaggtcgatccgtgacattgcagcgtgcttattaaatcattgccacacaggggggccgctgtgaggatggcgatcggcatcgtaagtgggaaagggggcaatcgcgatggcaggctagtcagaccctaatttctcgtctttccactctgactaaaaagggactccatgtccacgacaatcacgttaaaatgtctccgcttgaggcggaaatgaggaaacgggtctggtggtcgatctcggtgctcgagtcgggttgctccaaagtacgcgacggttcgaacgcaaagtcatatagggtctatcgtatcgtttgctgactatctgattttccttttgcagacgttcggtagacctagcggtctctgtggggtcaacctttcccagatcccgttgccaagcaacatcgacgacgaagttagtagacggatcacagctagattgccggggtggtgtttaactgttcttgccattttgcgtcccagcacttgacttcctcttcggaacgtcttccctctggcgtggctcgtgaaaccctctactccacattgatagcgcacagcaagttggctagagccacaacgattgtgcacacgtcgatcctccagctccagcctgcgccttctttggatcagatcaagcagtacgatcgcatgatccttcaagtcatcggagagttgcccagctacatcacataccctaccggccctgttcgatacggtttccctcgctatgtcttattgtggaggctcagggattggcgggcgattctgtatcgcccaatcctactggcagcagcatgggatcaggtcaaggagaagcatctcaatcctgcgatcgtggatgccatttcgtaagtccgatgcttgagcaggtcgatatagaccactgcggcggttctgacgatcccccctgcttcgtagtatctgccgatcattggctgccgagaacctgagcgagatggcggagtacatcagggcagcccagctgcgcggcccaactcgtgccgaagagtggtactgcatgtactttgctcatcaaagcagtctaactctcttgctatcgctggtgggcgaacctgctcatattgaagcagagaactggcgacaggtaggcctatgctgggctgaaggagatcaaaaggttaagtatgctgattgcgtatgccttcttcttcacagactattctcgccactgcgacatggttccgacagttgcaggcaatgaagacggtatgctcagcttatcgcatccctctacctacggacgtcgctaatcaaacctccgggttgaataggctggaaccgcactcgcatcgatcctcgaaaatgtagttttcgccacggctagcatcccgattcgtgaacaaaccagcatcaccccaaccgacaactggcttctcaatccgggagaccataacggtcaggccattttccctaacgacgctcttgatgtcatgcgttactggtcagtctaggccctggttcacttgctcaaaatgacatgctgatattctcgcttcgtaggaacgcgctttgcccagaaggagccacgggtcccgtctgggacgactcgatctggaacgccatgttcagcatgaacccagataccctcggctgaacgagctcatagaccagacgttcacataatacacacattccctatcataatacaatcagagtttcgcatagacctatagacatactgcgttatgagtcccttacgggcgccaagaccgcatcatcgacagactgtatcacccgagttgtatcaaccaatttcgacaagaggaatcttccatctgaatgcacaaatataccttgtcagcgatcttccgttccgaagcagatctcatcaacatcctcactaggtatatcgttgttcaccgctcgcgacctcgctgcgtgctcgtcttgacagataccagatatcacatgtcgccgccaaatcctctcttctgccaggtcttcgtgcaatagaataacccatcgctcatccaaaagtcgagcagcgcttgcccatggctcaacatccagggcgacatacaggccttcgatcaggacgatttgatgctctgcgctgatgatgatgtcgtcagcgactgggtccttcagtgagtgcgagaaggaaggggcccggatggtatcgccaccagaactgtgtcgcaattcctgaatgaacttgtggtacgctgctgcatcgaacgtatcatgagcacctcgtcgttgatgcgcgtcagctggatcctgcgaaagcgatgatgcagagggtcagatctggtggaaaggcccccctccctctccgtccggtactcaccggaaacttgtcaagttctgctctggagaaatgccatccatccattccgacgaccctacacagtttctgcccactggcccggttcacttctcggcatatcgccaaagccaattcggattttccactcccgggtccaccggtgatcccgaccaaaagccttctgctttcgccagcggctgtcaattgctggcggagacttataaggttggtactactctccaagatagcatgctgcattttgcaaagtctgagtttaaaagctcggtaggctcaattgttcgtggacgtcaagtaaaaagtaaggtacagcgaggtatcttccgagagaagatgatcggcgatgacgtaacgggatggtaacgcatattcactacaggtttacaagctacaaggactttcctgcatctgtcggctcaagcatctacgttgagtactttgagaatctctggaattttcttttgcagatccagatgaccatcgacaacgttcgaaatgtcgacgtcttcaacgccgggttgttcgactctccgtaaacccgctacgtgtacgccattcgacagcgtgactgcgcgtgagaccacttcgtgcatcctgcattcagtcggacggttaacaagtcttcacgaagacaaaggctatcgggtcgtgctcacctgactacagaagctagcacgaagtctttctcgcaccacgcgttgacgaatcgtctggagacaacccgacgacatttggcccactcggcgtccgtgggagcagctggcagcgagatgaggaaagccgattcgacgatctctggcaacgccgcgccgccggaacgtgagctcagatataacagagcgtgaaaaacagtcaaagctcccagactttgaccgatctgatcgtgagggcgagatgctctcagcgaatactctttgcgccaagtgggggatctcttaccaggataacaggtcgttgcccttgtaccctcttctccaaaacctctcccaggagacgaccggctttgatagccttgtcctgactctgaatccagacgttgtccgtatacatagaggccatgctatacacagacctgtcattgggaaagagtcgagtcaaatcacccttcaacgggattctcttccgtttcttcgctcacaaaggcaacgcgacggccgcaaagtaggcgtttagagcagtccgcttgataacctgtttcttcagatagcccttgagtttccccgtgacgaagctatcaatcgccttgcctgtagcgagcatgtgccgggtctcatattttaaaacgtagatgtcgcgaccatccgagaaagagggtgacttgggaacaatgttggattgccacgccgtcagagcttctgtgggagacttgatgagtagaccgggcacaatgatagtggcctgcaacaaacttcatcagcttcataccttcctaccaagaacctcaccacgtgctcacgatcaaacttggggctctcccctccaacagcttggcctcgtcttctgctcgcttttccctctcggcagggtcatctagactgattctagacgtccggtcttcgatatccctagtgctctcgattgacgcccggttcgacacagttgaactcggtctggtcgatgagacgacgctcgaatccttgttcatcctgaatgcttcgggtagttgagcatatttcttcttgaacgattcgatgagcgtgtcttcgtcgacatcctcgtcaacgtcattgtccgtatcgtggcctgccgattcgccttccgcattgggctcaggaaggacaatctcgtcaatccttttcgacccgatcttgacatccacaaattcaaactcgtccacacctctccacctttcccgaacccgtttccccgtcagacctccagcagtcacaccgaagatactgccgaggactaccggtgcggtagcggttgtcaaaagtccgaaggtcatgaagccggggatcaaggcggcgatcgctggagccgcgagtccgccggtgattccgatcgcgacacctccagcgataacgcctgctccggttgccagccatctccccgtcttgcctccccacccttccgcctgtctctctctggagcgcgcgacttcttcctggttcttctgttcggacacctgttgtagcgtcttgaacaaggatttggagagtttctgctccataggggcgaggtgagtggagatgggaatggacaagaggtcgagagtcgtatgtatcaattgcctcgccgaaggggtgtatgacaaggtcggaacggcctgtttctcatccttcttgtctgttcctgatgacgtctcgacggaagcgaccttttccgaactcgtcggcggggcaaagatcgatgcgataaccagtgtctcgatgacgttgttgtactcgatctctctttccgagtcggacatgtccttgaaatggtccgttgcagccgcatgaacctgttcggcgctgacaacgttggggaaaccggcccggtccatcttgatcatcttgatgaccgatccggcccattctttgccaaccgtaatccaccattcttttgtgatagatgggacattcggcaggatgggattcgatgtcgaggcggatacgcaggctagacccactaggagacgggtagaaggcgataaggtaggcggagtagggagattgtccagcgggtttggcgctgcagacgcagacgtcgccttgtggccggctgctggtatgtggctagcgaccgaggacaacagagatgacatcctggattgaaattccactaacgttggccgagagctactaaactctgtaagcaatctgacaagacaagaagaaatgagggaataggtagcaagttgaatatgctgttctggcgttctggcaagcttggagccgcgccagaaatgacgtcaccgttggcaacacctacacaaagtaaacacggcgtaaatcacgagtaggacacggtcgaaaagactcttcagcgagatcaggtcgaacgatccaatgtgacatgtcaagatcgaaacagatcaacagaaagaacttcaatgactgctagcctcgcagaggggcaagagaagcagccagatcataaaaatgatccgcgtcgtgatgctggaaggcgaactcgccccggcccgcgcgtttcctgctcggagcttccgcgtttcagccagcactccgcatgcatagcgaagatcatcattctttctcacgtccgtcaccctgttgcccacggctgaagctgatcccatcaatccttgtttgaactcgagtattccatcaaacgtaaacaaactcacccagatatgtgtcgttcgcgtgaaggcaagaagagcgtggcgtgaacagacaaatacttgggttctcatcagaaaagacaaccaggtcgatccccttcgccaccacatcgactacagctaccaagtacaatttcatgggagagcattccattttataacagatccacgaagttgaatctggtccatactagagatataattgtcttgcacgccatgccttcctgacaacgatctgctcaacgatatgtccaacacgtcgactaccgggggcgaccccgggaggccacttcagccgctctcccccacaccgcgttgttggtgccagatcccgccaggaaatgataacaacaacccgggaccatctgggatttctccaggaggttcgccattcggtgtgaggactcaggcggtaatcgatgatgtagaaaggatgctctcccgtttgtccgacgctgcggaagccgctgaggcaggatcgctcgagggaacgacgagtagagactctttctataccgcctcttcagacttgcgcgaccgtccaaacactccattagatatgttgcaaccgcctctacgaccgttcttctcgactcgaaggtctgccgaggccctcagaccccgatcagagggggttgccaagctggacccggcaaggatgagcttgttctctccggtccgtgaaaggtctatcatttcgagctctagtgaagcgccactctcttccgccacgcctaccagatctaggttgatcgggagtcgagattctccgttaaggcggtctttcaggccagacgaggaacagacgacaactccgatcgcagagagaatcgtcaggccgcgctcgactccacctcgagaggaatcgaccgataagcagatcacgaccgagaaataccaaacgagcccctctgaggatatgttcgggccaaggtacagacctgccttacctcctcgtgcagctgatgcaacgtcatcctctgccaactctgcatcggcactctcactgcctgtcatccaaccattgaatacgccccgtatgccgccgccactcccgcctcgtactcgcagcgcagcttcgtcaactggggacgatgtcgaatccatctcgggctcgagcatcaactgcactcagagcgaagcgggaagagatttggaacgtgctttgatgtccctaggatcgagtgaatccacctcgatcggctctctgctggactcgactgggagcgagcgtaattcgatcggaaccatctttgccaggaatgtaccgcttccttcttcgccatcaggctcgagggtcactcgatctgacaagtccggaatcggcgaggaggagaatgaggacaaagccacgactcctcgaccactgaacttgcctccaagggaaacggttgcgccgaattcgaacaacccatacccgaaacccgcgcggagctgggtccgagacccgtacgtggcgaggacactggacaacatgggaatcgaaggacctagaagggaattgctaacccctgtcgaagagagaacggagaggacaaagagctggagcggtagcagtatgagcgtagaacctatgggtaagcttggcagaattggcgaattcccgaattcccaatgaccttatcccgttgtcactcatgatttaggtaaacctctacctcttgttccgcctattgaaggcctgcctcgaacggccttttaccacaccgcttcggctgagcctcggactcccgcaaaggcagccaatttgatcaaattcttcgagaatgccggcactgtaggacccggcgacggaccaggacatactcgaggagcgactatgcccgaaattcactgccaaagtggtcagccacaagcttcaccagtagccatagggcagcctggaagtggccctttgcattccgagctgcctgttcccctggtggcagagttggaacagccagtaatggcggacgcaattcccgctggagtaggtgttctatcgaacttgcgaaaaggttccgcatccccactcagaagcgtgaggaacgtggtggcggcatggagaggaagggtattaccacactctagaccgagcttttctgaaaaccatcaccttggcgataagcaatctggcgctgattctgagctaatcgccggccagttcgaaggagagaaaagctcacgggataagggcgtgttcgacgacgcgtttgttacaatccggaggatgagtactaggcgtcgacatgggacggtttcacctgctcctccttacgaaactcgccagagtccggtgacggatcaagctcccacggtgccacagaatatcgatgtagagaagccgcttccaaccattcgagacactggggaggggtcgttgaggaagcctcgaggacaggtggtcagtacctataccgagatgacgactgaggtgagcgacacagggtgaacgtcacaatccgcatcagcaactgatcatgtagtctgttacgtccacaaagcctcggcggattggggaattgtggtacttgaacgtacatggcggcgagccttatacgtggatacagtgtgacgcagagctattcgacgaccgcttggttctaagctggattcccgaagattcgctcggcagtcgaggtgtcgtaacattggatctcgctcattgccaaggtatgtgtgaattgttcttgactacctacgaacgaacgccgattctaccatggttgttatgcagaggttcgatcggtgccgagcccaaatcatcaaagcgctcgcgacgatatcgggagcattgcagctcgtaatcatcatgaagacgggctggcggagaccctgtaccctttccaaatggtgagaatagtaacccatacctgtaagagacgtactgagtgcttgttgttcaggtctacgaagatggcttagaaaggcttggcagcggaagtgcgagagatcgagttcgttgggtctcggctatctggtacgttcgagtccacattaaaaatttctgactgaagctaatcacatacgcgatagggatgtactcgaacagggacccgatcggtcttcacagacccgggaaggctctactgcaggctcttctgacacaggctcgcggactaccaggctcgaaaggcttgtcgacacagtcgaagcacagcagaccgggtataggaactcccgcgccctcgacgatgctcatatccatgactcccagggtgatgtgatgactttaaggcgcggtaccagtaagcgccttacgaatcggactggatcgacactaaggaggacagcgtcggcggccgaccttgatatcggtttggactttgtgcatcacgatcgggagggtatcgtctcgccaatacctccagcaacatctggggatttctctccattgtcccccggtcagacgccccgagatgtggctccactatcaccctcaactacgctactaactgagacagacattggaccatcggcctcgatgtccggtcacacacccgccttcttcactgctcaatcggacatttttggctcggcattttctcaacatacgctaggtcggcgaggggctcgtaggataccgccaagtcgagaacaaagtcatcccggaacagtcacagctagcagtactcgagatagctatcttacgcctgtctcggttgtgaccgcgaccgacagtcaagctactatccgcccggtacacaggcggcgcgccagtgatcagtcggatgcaatgtctgccttgacgtgtcagactggctttcttgatatgctggaagaggaaactgtcataggcgataatcacatcacctcgcagagtggacgacaggggcgacaaaaaggtcccctaggttcccggcagtccctacgcatcgctctgcctcgccagaatacccagagtaccaattatcttactgctacgcagggtaccgaagcctcctacatgaccgctacaagcggtcgaccatcttcttcggtttcttcccgtagtcatgcagtttccgctctcgatcgtatctccgtcacttccgctacaacgagtgggaacggcgctaaaagctccccgcaacctaccgcaatgaggcagacgcaaacggtctctatcgccacttctctgtcgaagtcttcccgcacaccttcgtttcataggagctctatgaaggggccagtactcagtagcagtagcgggacctcaacttactctagctgggtctctacatcatcgtcacaaaaggtgagagtcgaggacatagcgaatgatcattaccgtaagcatgcctagacgagctgatttttcatgtcgcgatagtcatcctccgagaaactcgagaaaaacattccggatctcgcctccgagctcaagtatcagctgggccggatcgaagagcaggttgcgggcattggttcctacctggcggcaaaacctagactggccgcgaaaaaggagccaagcgcgcgttccctgaaaaacgcggaattcactccttcttcgcccccatcgtcgtctgcgtctgacacatcgtccagcagcaacggtagtctcccaagtagtccaaccgagtccagctccggactaaacattgatttggttgagataagagatggcatggatcagattcttggtcgcagcgaaatcattctggacgaacaacaaaagatgcgcgagcttctcgaagacaagatcccctggcaaaaggaccacatggccggtcgcatacctaccctgcatcgtattgaagaccttctgctccgtttgctcgtgagatcgggagattctgaaattctggacgaagcgggatatcgaaaaaacataccaccgtcagcggatggttccaaccaaagcgctagtgcgcattcccgtttcagcacagacgagaccgatacatccgttttctcaaacgaagacgggcttcgtgctccgccaccaccaggcagtttggcgaccagcttccgtccctcccatggggaccgcgctagtcgcatttccagctcgctactagtcacgactccgaggattgacggggaactcgacgaaaattgggaaatgcaaaatttgccagatgggtcgcctccgcctcgacgtgaacgaaatcgcccgatgccacctgacctgccttatctgcgcaaaccttatgttatgcccgaatcgatccatagcgaggatcaagaagatggagaagaacgctacacaactggttcgcgacaagacgaagcctcgcctaccgagagtatacccccacaaacaggtcccgcttcgcgacccataccggtggcgggtcgcccggggcatgatttgccaagaaccccggaaagcagttcgcctactctccctcggcctagaacacatcgaccgggtcctgttcctgagcccttgaatatcccctctccggttatgcctggccgaccttccaacatggtaccgagttcctttcggccgagtgcatctatgccaatgccaatgccgcgtccttcaagattagcaggtaaacgtgaacctatgacgaccacctagtaagaacaagactgttgtactagagacgaggtcaagactaattgcgtgatcacatacgacccttaagcttcagaagaggatttccgccgcctatgtttcctcctgcgatagttggacctcatctcggaccgtaccgaggtggagtacctccgggcctgcctggatttgggggaccgtttggaccggtaagcccaaccgaaacttaatatttacaacgggatctgaatcaaatcgtactagaatgtcttccctcggcccggctacccgcctccaggagcagcaggaggatcgtatggcttaccacggagaccaatcttcccttcgcgtctcccacgaggcgatactacgccccttagtcggtcgtctcggacagtttcttacacagattatagcgtcagtgatgaaaccttggtatttcacgacaagttatgaactgatccctccgtatcgtcaatcaggatcacagctcggacggtactttggaagaggtgaaagatgcggttgagcatctggatgacgtccagcaccaagcgattgacaaagcgcaagctttagcggaagcgcaaggccagcaagctaatgaaatcgggcgatatctgcacgagcttggtgaagtcatggactccaacagaaaggaccattacaacgaactcttgacattacacgaagatatcggcaagatccgagatcagattgctgaaggaggattgaatgcgaagaccgaggtgaaaatcataccccctcaagaagaagccgcacccggtcctccgccgacgagtgcgagaattcccgtgaacctgactcgtattccggaggtcctgacaccagcccagccggccgctcagacatcagtctcggttaacatcccggctcaagctccgcctgctgctataatgagtgttcacgagcattctgaccacgacagtccagctataaactctcgtaagtttatcgcatcataccctacgaagtgatctcaattatgcgttccacagcaattcccattggcaacacgaaagatgctgagcaagatgcaatgctaagggatttgcagcgaaagggtgaggatgtgtgtcatcaaatctttccggccgatcgttgataaccgacttcacagtcgcggaactgttacgaaatatggctggtgataatcgaatgaaggtgaccaactacgaaattacacaccaaccggatcaggctggcggagagaaggaaaccatcaagataacggaagttcaacaagggcctggacctttgcctcctaaatcgagtgatggcgaacggatccgtatcactgaggtacactctgtaccagccccagcttcaacgtctcccgtcgaagtcattcctacgattgtaccaacagagcctttgtccgccccgatcacacccccctcagttcgcttcgcgcctgagcacgtcaaagagaccgtaaccgaggcaagttactattctcgatttcctccactacgtctaacatctagattcgtctgatagcaggtgattcgcggcccgggattgacgcccgttgtggaaaaggaaaccatcagagaatacgacagaactcccagtgatgtcgcagctggtcgtgctcctcagcacgagactataatcgagaaggaaacaatcactggtgtggaccaaggtcatcccggaactctggagcgtacaacagagattattcatgacgcacaaccaccggcatccgttatccccccatcggttgcagatacggagcggctggcgccacaggcaccacttgggacccatgaaggtgagaagatctggaaggagtgagcagttcgagtgaaaatgacactgatcgactctttaggtatacatcacgataccgtggaggtagtcaagaaaccttctcggcgcagcaaaggatctcgttcagacgctcacgttccgaagaccaccgtggttgtcgcagaagatagtgctggccaccctgttgtgactactaccatcgaggaacacgacgtcggtggccgatatccacattcgacacatcctcccacaactatcgctcaagatcgtgattcgaatggcagtaaacataacccaacaacaaaattggtcgcgaccgatgttggtagtattcctgcttcggtatcgccgccaccagcgactgttgtggtgactccggcgccacctactatcgtggcccctgcgccacctacaggcagaggatatgatcccgccttcatcccgcatgcccctgtgccggatgcacgacctgccacgatcgtggcgtctgattctgctggtggcggtcttgcggtcaagccggtaccatccctagcccctctatcgacttctgcatccaagtgagtgatcgaaatagcatgagacgatggtactgatcatggcctttgctatcgcagcgtaagaccggcacacaccgtcgtggaccgggataggcctgtgatgatgcccaatcttcctatccagcctactccgggacccacgcttcagcctccagccaacgcttcgggtgagactatgagacccacgtctgctgatgtaccgctgcaagatcgaccgacctcactcgggaacgttccttctggatcagagtgagtggaagtcgctgagtgaacgtgcttactctaattgaatactgaaacatcccggtagagcaattcctgttagtagacctcagtccgtggcgggtcgtaagccgccgccaccgcgtcctgtgtttgaagaaggcgatcccatggcaccttccagctcacatgcggtcccgtcagcgactggagcaactctgcctcaatcctctgccaacgttccggcaagtgatgacacgagaagaccaccgggtgttttgaagaaacaaaccccaggcagcgagcgccccatcgctccaattgggcacgacgacccacgagtgcggttcgaaaccccaattcctacagacaaagctcacgctactacccctgcggcgacaagtgccaatatacctcatgcaaccgctggcacacagcctttgacgcagatcgtgcccaccgacacagctcctgtcccatcacaaccgacatctgtcgtccagccaaacgtacggccggggactacaggagttgcagataggccagctgatgccgtaacaaggccctctcagacatccagaccatctcgagaacgcccggttgttactcccgtgcctgtcatgcctacaccgggtccgaccgtatccccgaacgtacctcgcccgacgaccatgtcaaacgtccccaacgcagatgtggtgcaccctactacgaccaccgtccctggctcaaatctccccattggctctgtcccaacctcccaagcgccgcttcaaccttcgagtacgcagaacgtgccttcgggcctggataaccagctaggggatggctctggccatcgacctcaggtcaagcagaaacctgtttcgccagctgttatcccgcatcatctaccatcggatcccgtacacgtggtttctacaggaccgtcttcggggcctgtgggggtttcagacccggcgcaaattgaagcaaacgagcctgcccataagcccaacgtcctgaggaagccgcctcctggactgggaaacccgcctacggtccagcacagtattcctgatgccgggtcaaagagtggcgttgatgcagtgggaggaaaacacgctgacacatccgcacccccgggaccaaatgtcctcaagaaaccacctcctccagcaaaatctggcccaccaatcgaaagtgttgccaacattccctccgctgcagatcccgcctccggtactcacagtgtaccagttctgtccaccgctgcgactcattcagacgagacgctctcggcgccacccgtgcgaaagggcctccccacagtgcagggcgctcccggacagtcaagcgttccagggcagtcggaagccaccatttcgccggacgccccggcggtggcgacgaaaccaacgattgtgccgggtcaagcccctggcagtgtagctcaaccagctagcccggaagcagccctagcggagaaagagcgaattaccggtaagagctgtttgacaagtttaatctgaccaattgattaactgaacagccggccgaacaaacagcgcaaagcaaggcaaacgcggaaagagcaggtatgacgagaaaggctccagtttcaagctgactgcgggcgctaatccgcctgtcttgcaatatcatagaacaggaacggttggagaaggaaaggcttcagagagagcacgatgcgtctgtgaaactggcggcagatcgccacagagagcatcaagacgcgctcgccgacatcaagaagactttggtaagaacttcgctcgaattcaggtatcatcaagcctgagctgacggacacctctcaatggtaggataaccatggatcacaggactctaattggaaagaaacgttcgctcaggacgctaaagccaaagagaagcgtcgaacggacaagaatgaacgcgataagaaatggcaaggtgcgcgctgatggtgatctagtctagatctcgccgttgacgggcttgttgaatcgaatcatcagaggcaatggataagttgattatcgaaagggacactgacaaaaagtggcgtgagacggaggcgaagaagcctggtgggttatccgtatgttttggtctgccatgcctctagactgaatgaagtatcttaacaggcaatcaagctgtcatcgactacctcaagtgagtacattcgtgtcgtaccgacggcctggataatctcaatccccattgcatgtgctcgccaggaaacacaatgacgatcttacagctttcttgcgagctctagcggctgatctggtggcgcagaataccaatcagcatcagcagacacagcaggctgccaaggcttgggctcgggaacaagtcgcgttcaacttgagcggatagtgcgttgtccactactgcggtttctcatgcgtatcgagagttgatgtgcactttcttatatgctccagtcttgacgacttttccaaggcgttatcggtaagtgttcgctgtgccgcgttatcgtgcttgtgtcagcctgactgataggacacttgggtaccagtctgaagtgcgagcgctgcttaaggaggtcggagatctgagagagaccagaagggcgctttattagtaggtcgattagtcagctgagctaaaggtcgcgcttaccaagccttgtggcgctttagcgagctggcagagcttctactgatgaagggcaggcagtcgcaaggagacttgatggcagtcttgccgttccctactgcaaacggggtaggaccaggaccggggataggtcttcctaaagcggcgggacccaagcctaacccaccgggagcgaaggtgggtacccagttacggctctagctggttctccgaatcgctgatcgatgcgacatgcaggccgaggcccccaaaccggcgcccccaccagtcccacctgcttggcaatcgtacaatcttccgcccaatatgactatcggtgagactgtctcttggctatgggaccttcggatcgatattgaacgcgccgtcttttaggcaatcctgctcaagctccatcgaacgtgcacacgcccaagggcggaaagcctccaggaggggtaagccaagctagacagcaactactcgctcccatctcatcgattgacatcgtcctacaatacagtcgagaccgcttcctactccaggcgacgtcgtgagtgcgtgaccatcgggaggagtcgcgactctgtctctccaatgtgtatgctaacgatcaattcggcacagtgacgaccacgacgacgacccacccggcctaattgaggagcagaggttatgagaggtcgcgggggttcctcaacagacctatcgagattgattgctgctgggtaacgaacggtgtggggagacgcagcattcaggtttgcaatgcaggtgtactatgtctacaggcaatgtcaaacgaggatagggatcgatctgggcgtttataatcacatatcatacaaggtcatccgaaaatgtatacgccgggtcggattttttttcgaaaaggaaagagctcgagaatcgaagatattgccacgtctggaaccatcgtccgcctaagccgcagaggtggtggtggcggtaccggcagcagcgtattcctgcaaaggagctggcgatcagcagaaggctcggtcacggaacgactgttccttgtacactcacgagcatctccttgtccaaatcctcggccgtcttcttgggcctgggagcgcgcttggcagcaccacctcggggggcagctcctcgtcggatgggtccagcgctgtttgacaaaagtagatagacgggagtggatgaatcagtctcatgcccggcgaagcatgtcgtaagtaaaacgattgacgaaccctcgcgaggtggcagcaggaggcgcggcagcgggtacgggcctgggtgcgacgcgtgcggcgagagggaccttcgaagggtctacaacgacctcgaccttgagaggacgccctgtgtacgtcgaggtacgcggaccgacaggaggcggaccaaagtgaatgatgggcatgcaagtgggtggcaaagcggttccgagggatagaggttgaggtgttccagttgatgagattgcgtgagaaattcggtggggagatgacgacgaagtgtagtgatgataaagttgaggtaagggtgggttggcggatagcgaattgatttgcgattatagaagtagagattgatgaagaaaggacgaccagagtggaacgtgaatcagccacctgatcaagagataatgtcggacctgccgccgccgccggagtcgatgatagaacgttcggaaccgtaagccgatcccgccgtcaaaggcgagcaattcgaggaagtgccggggcaactctcgaggtttcgaccactctgcgaggcaccgctgcacgaccggtaggcacggagtcgaaagccgccgtcgtcgcctcggaccagctgaacgcgatcggttgtgcggtcgagcaaaaagcctcttgccagcaacgcgagtgaacagacctcgccgattcgagattgttcgtccatcgccgagcctgccgcggcgtccgaagcgatcccgaattcaagttcgagtgcgagctcgaccgtgcatgcgtgcgtatttcatcgtgagcgacgggtatcgtctcgacctgatcgtcgtcgtcccggttgatcttgccccgcggtcattgcccctatgccacaaggcggtgctgaccacctcgtacgacctccgcctcgtctggtcccgtcgtctgttcgacttcgtctctgacctggctcttcttcgcatcagcccgcgtcgcatgaacgttctgtggccatgcgtctgttgtttgcggttgccaccaagaacgccgtcatcccgctgttcacagcccggcgtctcgccttttccctcgaccctcaacgaggccaaaggcgacgacgacggcgacgacattctggttcgaaagaagatcaatcaagactgaaaacgcctactaactctggtcgatcattcggttgttgtctgttgtcaccgcgaatcgcccacgtgtccgtccaaccaagcaaagagtcagagatcagcttcactttccttctcccctagtgcgtatcttcacgccagcgaacaggggcaggccaacgtacactgttcgaaagccttttgcgcgctccccttttgcctaaagatgacggtggcgatccccttggacttgcccttgttgtcataagcgagctcgacgaccttgacctggcccacggtggtggtcatcaattcctatcaaccaaacaaatacggcaagcgtcgtcgtggtcagccggggtgttgcaggggagcgagacatcgttcggcccgtctgtcatatcgggctcgaattcggactcgtgtggagggtcgagattcgactcaccctgaccgactcttcctcgacatccaggggcaagttgctgatgatgaccttcaacgcctcgctagtcgcctgtttctggtggacgagcgggttgacctgcccgggcccggtctgtccggcacgtccactgccagggaggttccccgcgtacttggcccgggctccggattgttgttgttgttgttgaccctgaggacgggtagaggtgggagtgggacggggagcagagccgcctcgacggcctcctcggccacgggaacctttgggacgggtggcgatgatctgttgggaaaggaggaatatgatcagcgttttctcgtccggtctgttcaaggcaggataacacagagcaggagaggaagatggcgagaaagcccaccgcccatgacgacggcgacgacgaccttgccgaaccctgggcctatctcgaacttgccaacctcgacccaactcacactacgtattgtactccggtcttttcagacgtcctgacgacggggtccgctccgagcctgccaacgagggtgaccctggcgacgtccgatcgggggaccgaggtggagatgccctatgaccatggccagtgccgatttgggagaaaggagggacaagtgatgaggtcaggatgatggacaggtcgttgatgatgatcaatgagtctgtctgtggtggttgactcaccctgatggaggactttgcgatacgggagatggattgagtgaacatgttctgtacgtgtttgcaagagagtgtgatgtaggactggtagtgtgtgttgtgactggtcgaagaggagaggcagtgtggatgaccctaagtatatatgtatatattcgtagttgttgttgtagggtcatggcaagttgcaagttgatgatcaacttcgctctcgacctcgcgcgacgagtcgaatgaaagcggaaacacgggcgacaacgaggacattgtcatccagaagaggcaattgaaccagatcaagaaggagtagatgggatgagatcagttcatattgctcatcatgaaatactacgcaataacatgacgacaggtcaaggctgggtcgaatgtgatgctcgtgctagtgtgatgtcgcgtctacgtttcatctacctcgtcatcaatctaatgtcatcgccgtggaatctacaatccaactcgcaacgtcgtcatcgtcgctgtgtcttgatgtaccacattgacaccggtaccgctgcaccgacgacggcacccatcagacctgcccctaccatcttcttcctctcctctgtcaagcccaacgtcgtctcgacggcttgccaccactcgctcaccctactcctcactcccagatccctcggcccgaggacacgtttcctatcccacccttcatccaacaacctctgcctgacctcgtccgtcatcccgccgagttcatcgagtgaccacttgtcacacaccccgatcatccaattcatcctcctctgacccaaaggcccccccgtccccggagctcgcttccgtaggtcactccgaagtttccctacggaatcgatggcctgctctatatcccccggtaaactctcctcgatcctcttcctgatcaaggccgcgatcttcggtcccctcccgctcgtgctgaccatgatctgtaacggtcccctcctcaactgagatccaaagtagaaatcacactcgggtgggacgtcggcgacgttgacggggacgcggtgtttcctacaagctttacagacgagggaagataaccccacctcgtcgatcgccgtgaggaccatgtcgaaatcgtcgaccttgacttcatcgtcctccggccctaggtactttcgatcgaggtaggtgatatccccggtattactctcatcgatcctgtaggccgtctctgggtgtaactgcgctcgaggggagatgagcgtgacgtgacaccccgtttcgagcaggtagtacagtctacccgaggcgacgagtccaccgccgatgaggaggacgcgtcggttctccaatcgccaggcgaggaggaatgaggagcccttgatgatgggtgggaagggggagtcaggggtcgatgatgaagacgccgtggtagtagacatgatgtcgacagctgaatcaggtcaggtcaggtcaggtcaggtcagagcgaggtgagtgatcaatggacttttcctgagctcgacgtgcgcgcagccggtggacataccctctatttgagtgttggtgttccttactcgcttccctagtctgcgtgtatgcgtgacagtcgaatctacgctggtggatctgacactgggccaagtggtaaaagcgagttaggtcgggcgtcgatctcttatcgggcgatatcgacatcgatatcatcgacgggtgagcgagagatgacgagatcacgtgacgtgacatcatgtcaatcgtatcaacaagatcgggagtggcgtcaacgcgaaagagtgtgtttggggcgtttgatttcactgtgggaggccagtgcatgtcatagacgattctcttggtagaatagcctctggccatcttttaagttccaccctgagcaccttagccgcatcgtgtgacctgctgcactctggtgatcagagctgatggcagggattgagatccgaaacaagcgaggtctcgtcaaggtatgcgcgaaatccctctgtgcctgtaaatgatgaaaccagatcgagcatgtgttgggcacggttcgtcccactctggtcagctggtccagaacatgccagtatggtaggggctctgtaacccaagggtttcacgaatgtgtgattgtgcaatcaatccccccaatccagccggcagataatcggcataatcttcctttccgatcgacttattctaccggtctaaaggaagctcctttaggtaggttcgcccactgctcattgtcttagaccttgtcatgtaacgttctcgggtaatcgcgggagctatcatggccgagctcgactgagaccaccgacgacgagcgacagcgtcagcgacaaggaatttacggaacacaatgcgccgttcattctccgtcgaatcgacgagttcaggcgaacttcgcagccaaacagaggggcttacaaagcaagaaagtcacggtgcacgcggactcggcgctgtgtatgagatcggagagatatcgccagctgtgatcacaaacgtcatgacgagctcactcaggtgcgctgtttcgtgatctgaagcaaagtcgaaaagaggtaatcgatcgataaaatggccacttgtacacccgggctcaacgaggaaagtttgacagaatgatacaagcgcttgtagatataatgaaagtgtacgtagaagaatagggtaaggacgtaggtaagagaagcgagtagacgtgagagaagaaaaggatgtccgagagtgagggagacggtggtatcgtattcgcattgctcgctccgtcttcgcggaggtgagagctgttcgtaaagaagcctttagtcgtcggtcgttatatatcgccgcgtgagacatactcgtgatgacctcatcctagaccccctgaatgggaatccaatgcccatcggtcccgagatcggcgacgcaatccttccagatgacttcgagctgagtgcccggactgatcctcgacttcttgaacccgatatgagtttcactgacgatggtgacctttccattgacgtcttcctgcttgatattctgttcgtggtaatcgacacctctggcagcgagttggtcgcagacgtaagagagtccggcggcggcgacggacatggcgaccgcggcgggccaattgagacgaccgattaactcgacgcccttgatcccgatcgaaccggcggaatcggcggtgaagagacccttgatgatgttaacgcaagtttctacaccactgatgacgatattgtaagcgttcttgataccgttccagatgcccttgagggaatcggcgactcagttgatgaccgcttgcatctggtccgccaattggctcatgagagttccgacgaagccgctcgccgagatgaagacgtcagcagctgtatccctgctgtccttgggcaacgccgcaatggtctccaccgcagtgtgcgaggccgcgtcggtcgcattcccggccgcagtcttggctagctcgttttgctcgaggatacgggtcttccaagcttcgggatcaggagtcacagctttgagcttttaaacattgccggtgaactcgctcatgacggtctgcaacgagtaggaggtggcgatctcgatttccttcatcggttcgactccatttgagagtctcctcgttgcactgggcaacttttttttcaatacctctacaggcttcagggtgcgtactgctggtctcctgttatcgataatggaatgccagtatgatagaggacctagcggctgctcgtattccatcgctgttcggcaagcaaagtgtccgaggaccgctgtcataactttgagtacagagaagaggtcaaagatggcggcaacatcgctgccgttctaaacaggcagacccctttcatatgggatcgggcgcacctcgaatccgcttcgtcaacatattcgttatgcttggagccgtttcaagtggcctctaggtaaagtagcttcgagtcacgtgactatgatccgattaaatgacgaatctccgggcgagacccggttcaaacgttgagatgctcatagggtcacaccgaccatatccattcatgtcgtagtcacatctttgctcgacgaaccagccttgcatgcactatgtcttgctcatccgaagcacgttcacatgatcatggtcacgatcattctcacgatcattcgcacgcccacgacctacccagtggggaccccaacgctggagacaagaattccctctacagcaagatcgaccgggaacatgtccgagccttgaatgcagcaggaggtgatgaagccgggaagaacgtggtcaagtgggtaataagtgattgattcactgactgtgtacaagtcgaactgaagtgtggcggggcggtgtctttgggctaggccgtgggatatgagggaagatgaagcacaggtcagtccagcgtcccgcatcattcaggtcaggctttgcgggaagctcttctataatacttcgtctcttcatatattgcctcacacctatggatgtataccatctacttggtgacctgccacgacggacttgctggctgtgctccatttcgtgattggatccatatgatgatgcaccccgctctccgatgacaattgtcacttctctcggacgacaaccacacgacaacctcgatctttggacgataaccaacgcatggaacgctctacctaacaaaacattggcgattgctactggtctacacctcttgcttatcgattttgtcatggcgcgatacctcacagtactgcgaatccgatgccgacgatagcttgatcatcaacagtgagttacagttccaatgacatagaggaggccgtactgatcagttgtgtagtcccgttcacggcgcagatcaagctccggagtatcatcctgaaaacaggtccaggcggtctcacacccgaatcatgccatctcgtcagtatacagcgcctccctcacccctaatagcaacctgaccgataacttcgaggctagtacgtgaacgagcctggccttgatttctcctctgttgaaggccggcccgctaaagaggtcgtcaaactggtagcccaacgggaatccgtcgagtatgcgttgagacctagcaagttttcgggggtcacgtcgatccagctcgtctttcccaacaacatctccgagggggaggaagagactctgagggtctactttgtcggattcaagggggaatggaacgaggtgagtttttttgctgctcatactagacgttgaatagacgtcacctgatgaacctggggtcgattgatagttgacacggaatccggatgggatcatcttgtacgaagctcaggcgaatccaagcgatcatgctcggttgagagaacaggtcggaggtagtcaaatgggtacgtaatgagcggggatttgtatgattgcattgcaacatatacgacataacctggaaggtggaccttctggtcggactcggcatcggcctttgcttcgtgtcgtgagggtcacgttaggcttcgcgacttcgatggaccaatcgactagcttgatcgttgcagcttcttctaagcagcttgcgtagaccgtcagctgacccgtaatctccgtgcaaggttcctctagatcatgagggcctgtgctcgcccgcctacgctgacaacccagatggagaagcgaggataacgcgataagcacagtcctgcttccatgtaccaggttcaataagtgtttgccgcatccgaggacggcctgggaccgacagctacgcggacctatcctagctctcgcaaagtactaagcatcctttcatagatcaggctgtcaaaaaggcgttagcttcctgaagtctagctcacccggaatggaccaccggccaggagctcctgcgcgcctgtgaggtgggaatgagaaagaagcacttcccagaagatgcacttatgtcttcccacaagttccgagttgcgcggctgaattgtcgtcgcagcgcttaaaagagtgaccgtgtgctacgctcgagcgcggatcgaacttggcaatgtgccagccggtctaggtgcatccgtccatcggtcgatatcgtggctcatcgttcaggaatacatagaccgtcttgaagtatgcctggcaaccagaatggctcccgcccgagctctgcggcagaacgtaagcagtacctacaggaactccaagtaagtcggtcctagcatatgcagaggagactatcttgacatttagctgagcttggctcgcgcaggtcaccaagaagcttttcccgacccaaaaagccgggataaaggtcggtttgtagttataccggatttctcgactgaactaaaatttgagtttcccttgtcagcgagccgagaaaatcgttgagaagttctcaacgtcatcctcggtcctcagcctcgataccgttgagagcaagccgtatacagccagcaagcatacggccccgaccgcttcaggctcgcagcgcacaatgtccacggccggagataacacaacccgatgaaatcaagtcttggtagctcactaattaccaatgacttgtatttctaaagcacggctggaaaatgtcgcaattagtatggaacatttgtagggctgcacgacatgtatcaatccattcacgttaaatatgctttgagaatctgagggtgtatctcgcatgtctggtcgatgccttgtcgatgaaactgctggagccggtcggtcacgtcaaccgctggaaattctgaagacgtatgcgacgatctgtgtcattgaagtatacgggtgccaggagtgagagcgtcgatgctccaatacagtactttggcctttaacgaggccgaggacccccccgatcttcagaaaagctggcgatatgatagtgagccgccgtaggggagggcaggacttgttaccgggtgaccgagactttgtcaagccgtcatgggttcgaccacaccctgatcttgcggtccctgtcagatctcagcttggaacacaacggttaaaggctacagttctccttgagacgcatcagcacgctacttttggggagtttggacctgctggatgacgtagcgataatcgtcggcagatcaacagcggccgcggtgttccaaaatgaagctaatactgagtttgttctggcaacacagacagttatcctggacgtacctgcaaaatcactagtgtacctgccccttctctccctctcccgctttaccttgccctaacgggatcgagatcgacatgatgatcctgatccatgcatacaaggccgtaaggatcttcagcgcaatctcatgactgaagctgaacacggacatgaagtatacggtgtatacggtgtactgcagggatgcccagtataccgtcaactcttttgttcaattccgccagaaggacgattgccaaagggctcaacggatcgacgacgctgaggcggcagttccagccgtcacgcaatggctatttgatggcgccacgcgacattgagcaattcagctgcagagcgatttgaaacgtgccggctggataccagatcaagacagtttccctaccctcccctacggcgaacagcaggacaagtggatcctatgtcccaagaagcacaaaaaatatcattgacagaatcgcgtggcgccacgcaatcgagtagcgtctatgtacttaatcaaacagtgtatatgtcttcacgattatcacggattgagacactgggctggacttgcggctatttatccattgtgactcgctgtcaaaccaattccttcgagagaaacaactgcaaaggagaaaccttctggtgttacgaagcgttatgagacccgttcgtgcgcgagtaacctcgatcaagccaagcaaagtctcaacaaaggggaaagcgccgagagagccccaagccaacttcatgacgagagaagagatcccgctcttgagagacagtatgccgatgaaacgaggcagctcatggcatgctaacggtagacgatggttgattcgaggcactgctgtttgccattctagaaaccatatccttcgcttttctcggagtaggtaaggcgccctctgcgtcgctgaaaacaagacagggtcacttagttgcagtgttatccattacagggcgacaatgcagcgacttcgatgaaacaggaattcaccgaggattcgccgctagaaaatccggttcccttggtggcagatgattcatcccggccggctcataccttgagctactccattgaaaacagcgacttgttgtctattggagtaaccgtcaagagggaagaatctgatgatgcgtaggtatttacgtgcggtgccggatggattatcgagcaaacatccgttcacaaccatccacttcttatgcaccgacgtccccgtgcccgttgactgtgggatggttgtattttccagtgaagcactgcagaactcgcttgtttttccgacggcactcagagagagctatttcccattgacttatgactatctaactagactgaagaggttgctaagatgcactggatcatgactaatagccacatggagctctgcccgagtgattccttgacggtgcctataaagcttatgtcaggtacatcgagggtcgctcacctgcgttaggtcttaaaaataacgtgtacgcttagcaagtgaatgactaggtccgaaaagggaggaagttagcttgtcggaccggacagaccatcttggaatggcatcgcttcgagtaaaccttgtgatattcgaccacgtgaccaaactttcgctcaaaaccgtatgtgaggatcgctttctcaagtcgcctcagtactcgactagtagcaggtcacgccatgacacgcattcgcaatagggcatcaacgcctgatgcttcctttctgacaattctccatgcctgacactgtattgggactcaagcgttaaacgatgctgcacagtagagacccagccagggcagcaagttatcctcgaagctgaacagtacattattgatcggccggctgcctcgagccatggtgacacttgtaacgacagtggtcaggagggtgtccgggagaggccggacgatacggtcgacgcggaccccgcctctcacagctcggtcggagatggctcttccgcgcacgaagcttaggccatttagtttgatccccgttcgctaaacttgccgctaaccaaaactcaagcaaattaagatataacttgcattctacattccgacgttcatccgctgtttcaggctgagcagaaccgctgcgtctcttaacgatagacgcgcgctaccctatttgaactgcaccgcggatacattcacttataaaatcgaaaatgtcgtcacttttgatcgaaatatgacgaaagctagcaacctcacctttgattctaggcacttctaggtcaaaggtcagttccgactgttgcaaagtatcgtctcttgtaaacagtgaccttctggccacagccagcacgtaccatatccgatcttagcacagtcatggacttctcaacgctgcatgatagtctcggacaattgccggatgagctggtcgggcggatagcagggtacctcgataccgccaatgacctcatagcctttagcctcgtcagtcaactcggacgaatgatcctgaaattccatcactcatcctagcgctttcgggacctccgatagacctgccggagatgctacgatgtcgctcaggaagcctcgatgcggtacaagatggccctctggaagaactcgcaggtggacaacccgtgctccagcttgtcggcccaggagaaactagacgagcttgaaatccggcaaagaaactggttggctcttcagcctcgtgtgaccgaagagatcgtcatcgaggggagtacgagcgtctacgagatgcaggaagggttattactgtggtgcccgagggatcaaccgcaagtacggtcgacagaggttcagttgttgagcttgcctacggggaatcccaggttgaggaaggtggtcaccgaggagtatcgggatacagagtgttcgatcttggacctgcatctggatcctactcaggatctgctcgtcctcagtgaagcaatgtgagcgatcatccgggtgtcgtcccgcatgctgccttgttccgtctcacaccctttgctttcgtctgggaaagaccaccgccccggtcggacggtaccaactcttcagccagatccacggtacctctccagaaattcgtctttcgtaccctatccacgctggaaccccatccattggccaccgagacggctctgctcggtcccccgctctttcccttcaacacgatcgtcagccagttgttgcagatctacggggacgtctttgcctgtcttaccatacctgtggaagtacgctcagcgaggatctataatcaagagctgaacatttggaattggaagacgggtgaacacctctgtgtgagttctcgtccttgtcctctgacccgactctgcatctgacttgcttgacgatccgctttgaattccgcgcacggtttagcaattccgactaccgttatctctctgtcaagcgagtttcgccatcctcaccgagaccgagttcatgctcaccatgcaccgtcccgacgcggacccttcggccgagatatacacgttcgatcgatccgccctgccgacggcttcgaaagacccatcgatctatcctgtattgatggcgcagttctcgttattgccgttacaagaagacgtacaagtggatctggacatgcggcccgatccgcctttccctacgggtaagggaccgaacgccctcgggccgagtaaaccgttcacggatcatcccgaagaaggggtcttggtcttcaatatgacggtgatgacggccacggcggaggaatttacccatatcgtcatggtcgcttcgaaattagggatgctccagttggcaagggaacggtacaagaagtgtgcgaattgggccgaagcgaattacttgtcgggagggagggggaatcgggaagaagaggcttcaagagcgtacatgaaattggaatgggaactgtgggggagtatctatacccggatctttgaggataacactttgggcgtcaactgggtaggtagacctattttggaaatgagaaacgggcgggaccgtctgactgaccgcttacgaacttcgcaggtatgcttcgttcacgggtatcgatacgcccgattatctcggatgacggaggaacccgtgcaaagacctcgtctgggtccataccagatcgaggtgctcgacttttcaccgatcgccacctacaatatgcgacaacgcgaccacggcgcgacgcaccggctcgaggacgggactgaacagagtctcgtctcccgtctgagcatactgaacaaccagtatttgttccggcggacgattatgagtagcttgccatatgtcataacgacgacggggaagcgttacttgaccgagggagttatgcttggcgatagctcgctcattatttccagggtgagtcgcttgcggaggagagacttcgtatcgcccaggctgatgacgagacgtcttgcaggcggagggatacggtgacggcaagatcaggcagacattgaccgtactggcaatgtaatccggttcgcttgattcacaggcaaactagtaacgaccagcatcagagcacggacacaaataacgacattcatccagcatataaatacagtgtatcaactattcagccgaaaaggagcacattatagcatagaaaattcccacaccgactcgcgttcaggcagcttctcggtgcgcttgacgaacaaactcggcggcttcttccctcgtgaaaccgggcttggttcccttcaacaccgccgacggttctttcaaagcgaacgggctaggtcgaaagggtcgtttcagcttcgatctggatggccatgtaagacctagtcgactcacctaaagtctcgctgctgatccaggctggcgtacgaatggttgacgaatcggtgcgcgctctcgtccgctcgaatggagaggatgacgtcttgcatggtcgacttttccggcaatcgccagtaatcctgggagactcggaccaagttaatatcgcatggtcgcaccggtcatatttggcgtgcttacgatggcgatagcaggagcgggcatgtctttccactcgggcaaccttcccttgtccatctcttcgagacaaagcgtgtaggtgagacacgcctcttcctccagatacccgacgaatcgatgcgccgatttcgggctgacaaggtatgccaggaagaagaggttgaagaaaaccccctgggccccaaggatcattgctcggaacaagaccgagggctgtttgatagtcatgaacgtcctgtcgatgcgcgacaagatcaggttcggtctacacgaagatggagtggtgggttaccgactcacaagagatgcattcgttcgttctccgcttcagccatcaaggtgttgatccatccgccatctcttcgctaaaccgccgatcgggtcagcgttcgtctatgatagtcactggtctagatcgcacacgcaccatcaatctgagactcctcaagtgtctgagcattcctgccaccatccctggaacccctgcgatcgactccaggaacagacacctcgcgagccattgctccggggtcattacgtggttcccatcgcgaagttcttgcaacgttcggtgacgaccgtcttgcgggatcggtcggtgccggaaagaatagccagtgacggcatcgtagcatgtcctgcgagatcgggttgcacaaggggtcagacggtgtctgcgcgggaggacacacgcccgaagactgacctggatagtttgactagtccagcggtgatcttgtcggagagtgtgatctgttccctcctgacgacttttaccgattggagttcctgtgaacccataccgcatcacgctcagcattggcgctgtttgacggtgtaaagaacccttactgacctcgggggtgtaaaccggatgactgatcgtccacggtcctgtccttgaaggatcttgtaaatcatgtacttttgtcaagatgtccgactctgtcaccatccggccatgaaaagcgccacatcagtccgacgaaccgctgtcctccaaagtagtcggccgggaagctctcgactcacgtttgaaatgcgtgccttcacttcccttgccacccgtaggtttcaagacgtcctcccccgtgggatcgacgatcgtctcggcttcctctctctgtttcgtcggctccaggagggccgtcgatttctcgatccgatcttcccgttgcgccgacccgtgcagcgcccgggacctggtcacggtgtagccggagaggggtttatgtgtgacgctgagacgagggttgactgtctggtggtagtggcgacactttgcaagcggaatcgagttggatcggagtttcagacccgttctgagtagggtggcgggcagtggacgaaggttgttcatcttcggaggggtggtgcgtagtagtggtagtgtgcctgatctgttagtgatagggtcgaggcgatatgtatgtttagacgactgtattgccactgatcgcaaacgtcacacattgatatgcaaacatctacaaacgtactcctttatattcctctcgaacctctcggtgtgactcccatcagcccgccgtcaaattcatccgtgagtccttccgaatgatctgatctctctacgccgaatcagctgatcgaggacggacactccgacccgtccttcccgctccgcctcgtcgactcactgagtaacccaatcgattcagcctactagtccgatacccgagcggagagtttcgtcgtcgtcaaatggcgtatggcaataacccgcgatccgtacgaggttccaagagcccacctcaactcgcctcacctccgctgtggacctcggcgattgtgcgacgtttttcgctcgttcgccgagaaccgggtcccgttttcacccgggggcgaatgtacagggattgagcttagacttttcgttgactgtgctttaaggcgggtgtcgggaggaggggtttgcgcctgggacattttcgtctcagattcagagtcggattcaggttggcgggtccatctttcaggatctagggcttgccgatacgagctgtatttgctggtagcggtacttgcgggaattactagctgaaagtcatggtgaccgcccagctccaagggcactgggtgcagtgcaccggtcacacttgactgagacggggcacattcacgacgactgagtgacggagtgataaaaatctcctcgatgtcatcttcgctttaattgtacttggttcattggacgacatgctggcaaatctggaaacgatcgaatcgcacggcctaaacttgatggggcgcggaatgttgaagaacttagacttcatccggatcggtgcagctaggacgctgagcatgaggcacgtaccgtttcacctgtataccttcggtgccacagcaagctccactttacccaagatcgttcgattcgaccacaccctcatctcgcggtcgccgtcagatctctgctttgaacggaacgacaagaggttcactcccgcctccaacgttttaccccacctgcgccttttcgcttcccgttggctccccggccgggagccccccgatcaacggtcgtggcgtgaacgacccgtctgttgcgccctcgctgcgaccacggggcacactcgctgacgaagcgagacatttaaagcgattcacgtgacggtgatgatgatgatgatgatgtcatttacttccgagaccctgaaccctcttgccttccctcgtgattgtcgaggatcaaagactgtggcccgggcgacccgagagcgttggaaagttgccagaagtggatcgtcgacctcggctcccgcccaacaagtgggggatgtggtggttggtggtgggtgggtgagatctgcttggcaacatagcgcaaagtctcgacggggtttccacatcagccatacagccatgcacggatgggggtcagctgcaagttggaaaacgaggggggacgggattcagggaatcaggtcagatctcatcgctcgtggtctatccacgggaacagcctatataagctataagctataagctataagctataagctataagaaataggacataatacacattgcgacttacagtcgcttgctccagtagtcgactcccatttcgcaagctcgacttcgcatctacatcgatagtagcaaaagcaaaagacctcctctcctgtcgaccatgttcgtccgaggtctagccctctccgccttgatcggctcggcgtacgctcaggatactacctcccccgtcctcatctctgcacccgcttcgagctcgatcgctagcatcacctctgctgctacccaactccaatccagcgcgaccgccctcagctctgcctcgagcgcaccggggtcgacgtctgccgcggtcgtccctgccgtctctgctcgaccgacgacgttgaccgttagcacgacactggtctcgttcgtcgcgacgtccagcacgagtgacgttcccgtggccacggccaccccctctgcggctgaacctgccgaacccgtcccttcagcacctctacctcctgtacagtgtgagtagcatcgatcggtttcccttgagggcggcatggtctaccgtttccggattggcatgcctggtgactcccgtcaatcctttcctctggattattgctgacgaaacccttttgccatgcccaccttgttctacctaccctacctacgtccggcaacagcctggtgcgaagaaggaggaaacgcttcttactgtgccggaccgttactccagctcgtccaactcgcagagatttactcggactcgaagacgtttagcgacaaggcaagtccgcgcttcctcttccagcaaccctctcagcattcatcgaggctgtttcgggctttacttattcacttattgtattgcacacactgatcgtcgcctacatcatgttgtcatcatagcctacccgactcggagtgaacgagacgttcgaggcgtttgcccagttgccccagaatgccacttatggacaggtcctcgaattcgccgaggaatactttgtgagtcccccccgcacgagccacattgcgtctccagagcgatacgctgacgatcacctcacacatggttgatgttgatatcgataccgacgacctgatgacggcgatggacagaccggggaaggtcaagagctcaactcggtcgacattcagggtttcaacgcgaccccggccgtactcgacgagatcgaagaccagttctacaagggtttcgccagtctcgtcaacggatactgggccttgctcatcaggtgggtcgatagatcctgctacgctgtggagacggagggaagtactgacttattcaattacggcgacagggagacgaacgagactgccatctgcaatggtgacaactgcgattcctccttgatccccctcaaccagaccattgttgtccccggagggcaagtccctctcaagcttttcccccttgcaaaacatcgactgacggtcaatgcgcatctacaggcgctaccgagagatttactactgggactcgttctggatcctcgaaggtcttttgcgcagcgagttgaactcgtacgctcatgatctcctcgccaactttatggacatggtcgagctgtacggattcttgcctaatggagggaggaagtattacttgaacaggagtcagccaccagtgttcaccatggtgagtttgatggcggtgctatacacccaccgtgagagggctcagcctgacgagtggtcacgatcgtttgggatagatggtcaactcttacgtccaggtcactggcaacacgtcggtcctcgagagggccttgcccattctagaagtcagtcgaaagtctccttgaagtcgatgatattcatgctcaccctctgtccctgacctctagaccgaactcgagtggtggagaaccaaccgatctatgtcggtcacgtcgccctacactggtcagaatcacaccgtagcccactacgacgtctcgatcaacactgcacctcgtccagagggatacatcgaggacttcaacacggtctttggagccgagcccgctctaaacgagtctcagcgatccgacctgtacgctgaactcgctaccggtgcagagagtggttgggattacagcagtcgatggtgcaaggagcctttactcaacgtgaccgacaacttgcccgccttgcgaaccctgaacgcccgagccatcatccccgtcgatctcaacgccctgctttacggcgaccatatgctgctggccgacctgtacgagcggtacatggccgagatggacgggtccgacaattcgaccatgagcaacttgactagcaaagtcacccagcacaggatgatcgccaacgagaccagggacgccatcatcgatctgcactgggatgccgacaagaagtatttctacgatttcaacaccgtgggtcgtcgtcgcctgccgagccttctccttcagacatgctgacgaccgacactgcacggcagactgctgatgcccgggccgacttgttccacgccggtggattgttccccctctggcaaaacatcacccctcccgagatcgtcgggaacgagacggccgctttagaggttttccaaggtatccgatttatcgccggcaaatactcgggatcgcccagcgttgctactctgctcgagactggcttgagtgagtactcgccttttctagcatctgagccggctggctaagactccgtcgctgctttgatagactgggacttccccaatgtctggcctgtgagccctcacgaagccataacctctcggatgtagcgtgctgaatttttgcacacctacccatagcctcacacttacacctcgatcaaagcgctcgaggccgtcggcagactctaccccaacggaaccgtcttggataatgtcacgtctagcgatttcgcgtcgatccctagtggacagctcggtatgaacgagaccgacctgccagaacagcccgccgaggcgatcggacccaactcggatctcttcgccaacaatgtcgcagagattcaagctggaaagccttggtggcaaggtgagcccgtatcggccagcaaccccagctcaccttgggaggctgacgtttttctctgttcatcgcagctattgccatcgagtatgccaaccggtacatgcaatcgaccttctgcagttggtacgcgacgggaggtgagatccctggtttgctccaggctctaccggacgatgcgaggtctggcaacgcggatgacagcggtcacatgttcgagaagttcaacaggtaagtctgattcccaaagttggcggtaatctcaagttgctcaagccctgatctttcgtgtgtcgctacagtactgatgttgatgctgctggaggcggtgtaagtttcgtgacatgacaggagagtttcgacaacggctgatcggtcgattttcaatgtgcatatacctcagggcgaatacgaagtagtcattggattcgtaagcctatcagcactgctcggcatcctgttaatcgtcatctgaccaactttaccttttttcgtagggctggaccaacggagtcgtcctctggaccgccggagaatacggtcaattcttggccactcctacctgtcccttgatcaccatcgtcgagaacgacaacgctaccgcctccaatggtaacgccaccatgagcgccagcttgttcaagggtgttcaccaccctaggaccaggcagtaacggacttcgcggaatgcgagcgtcgcgagatcaaggaaaggacaattaaaagtcgattctgatcagaatgtcaaagaatcataaaggctgttcgtcagccgtacgagatcggcgcggtctcgtctcaatatcataattatctgtttctcgagctggccaagaacgagacccatgtgtgctgaaagacacgttcgatcgatcgggaagtgcgccttcagaaccgtccgagcaagatgcatgggcgacgacgatctttttcatcgtctccgaacctgtactttcggccgttgcgattaacggcttacactaacaatgacgtcgatctttcctcctacgaactattaatctcagtggatatagcagacttagggaacggtactctagcgtttgtcgaatgtagcggccacctcggccagttgtatgccgggaccaaacgcgaacacggaaaaggcgttcatgtctcacccgactcgcacgcaagttacggcatggtctcatctctctccatctcccgccgattcatctcgtgcagctgcatcgacaccgatctccttttgtttccgacacgcgacgacgagcccatcgcacatcgtcaacattctgacctgctataaacagattctgctcgtcagatcagactttcctcctcaagaaccgacgttacagaaaccaacgtatctaacagtagtacaagcggtctcaaagggttctcggtcttttcttctctacggtctctcaatcctctttttgcgccggtcgctatcaacttttcagcctcgacggtcattgctctgccttcttttgggtttacgggaaaaatcgtacttggaacaaccgatatatcatcaactttgtgaatcggtgagtgaaaattccaggtctagaattggcgcctgtgttccccgatatcgtgcgatgcgatgtctcatagacgcggaatgatcgagctcgatgagccgatgaaaggaggaaggtcctgggcaaagccgaaattgatgatcgcgatcacggggaagagttgaaactctggatgttgaaacgcgtttcgcgatcaaagggggaaagggaaggggggtccttttgccgggaaggaggattccaaagggattcaatgatgaaacgtgatcgaacgtaaacaaaagcgagatggatggagagttctggagaagtcttgatgtcgatgagggatatcttactagttcgcgaacggccaattgacgtcctatatttcttccctcttgctttgttttggtagcttcttcaatccacattcattcccattctcgtactaccatcactcactcgttgatcgagtcgaattcgtggttatctaatctcaatcttttgctcgacggcacctccctggcggaagtgcatcaaacgctcattatcgacaagcaaatatggtatccctttcaacttccaccatcggcgcaatcgttctggctctggtagccaaggatacggccgctcatatcgtgctctggtgagtcggattgtcgatcgtccctctctaccctccgccttcaatcccgtaccataagcgaagtggatgctcaccggagaacttcccgctttacccatccttcggctctcaaacatgacttgtctccgctccctctcccgacacacactcgcaggcatgatgctatgtttggttgggaccagtccaacatcaatcagaacgacgcggtgaccccgttggccgatatgacgttcgaccaatggtggttccacgggtataaggatcgtaagcccgccgagggcaagttcatcgacctggtgagtgcgatggccggtttttttggtcctaccgatcgtcatgacgtcgagactgacggaagtggatcttctctggctgtcgtgtatagcctgctggaggaacgttccatggcgaagtggtgagcatatccagcctcaacctggtagctctccagaactccggcaaactgacatcgatcattcatctaacccatgataggcatgcaataaggcccagacttcgtggaaccccgagatcacggatgacagtcaactggaccagtttgcgtgccacgatataggccctatgcatacgactgatgcgaaagggtccgagaaccctaccaacgtcaagggtgagtgtttggaactatcgacttgaagccagctctagtacaaagctaaacccgtctgaccctgcaggttgtggtctggccatcgcgtacacgagcgacgagaacagcgtcaagccggaagattttaccgtgttcagcgtggatcacaactgtccttggaaacgcaaggtcgatttccccgtccctgccgatctccccgcttgccctgaagggggttgtctctgtaagtgttgaggtagaagaagaagaccatgttctggacttggcggcagggggctaagttttgcgatctgtcgacaggttcgtggggatggattcactcgccggagagcgggtcggagcagatgtaccatactgtaggtccaacgtctgttctaaaccacacaacgctggtgacattggctgatcaacctttccatccgctaggtctaccgatgcaaagtctcaggagctaccgagacccgatctcttcccgctcgtcagtacgatcatctctctccggcatgaataagtggtactgataaactgctttccactagccctgactgcaaacaagtgcgattacccttccgaaaccaccaactgtactgtcggtgggaaacagcctcactattggttgcaaaaagagtgagacgccaacgctgatacaagcagacgaaaagaggttgatcatcgactcgtttcctcaggggcaacaacaacttccaagactactatgatcctccttactatgtgagccaccgagacacgtgaccttccgcaaaattcgtctgactggaaatgcgatgtcaaaaacagaacgagaagtacggcttcatgcaaggcgctcagacagaccttttagctggcgttgctcccgctcgtccgacgattgcggtcgagagcgctgctgcaactccggccagcactattgtcgcaatggcgagtacaacgtcggaggctgtagagccgaagccgactcaagaagccccaacgagtgtggcatcgtcttcaaccgtaccatcttcagctccggaatcgtccacgcctaccacgtcttcggtcggccttcttccctcaatcgcttccagtgtcgcctccagcacttcttcgacctcgaccaccatgctaacttcgcaggcctcggccgccactgcatcgagttccacggcacccgctgagaccaccaagtctgcaggcaaggcctgtaagcgcagcatgcacaatgtagtacgtcacgcccgccgtcacacacgggcagcgagaaccgcagccgtggcggaaactatgcgccagcgtgaggtccttcaagatcgacagagactctacgccgaagggctggcgatcatggctaggagtaagctcgcataagacgaagcgcagctgggtagggtgacgattgcttgtagctggaatacgaacctcgatataatatggatgttattcgattcgtccaggtttcacccaggctcgagcacggacgcctccgcgtttcatcacatcggtcaaaggaaagggactggcattagtcaagcattttcacctggccggtgattacactagctctctagtatcgcgaggtagtctatcccatacgcttttccgcaaccttcccccttcccacatcccgttcctactccttctccgatctccaccatgttaatcggtgccatcctgctacttacatccttatctttgaccgtgcatggttcgccgctgatgcgcagaaacgtgcaaccaaagatcattcccctcaatcttctggaatcttctgcttcggtgactgccaagaccatcgaaggggatatccgtcgatccgtcgatcgtctccaccacgcgctcgacaactatgaacgtaacacgggcgctccgctgagccatactggcaccatcgccgagcgttcggtgagaaagcctgagttgggcaaaaatgagacgctttatccagagcgcagcggaacctggtggtcggctcagatcgaggtgggatcgcctccgatcactgtcgatgtcctcctcgacacaggttcgaccgatgcctgggtcgcctcctccttgtgcacgaacaaagagacgtgttcgacaagactattagtgagtgttgcttcaaagacgggctcgtgaatggatccgtgctgaagttgctaccgagtgcagtacgagccgccaaataacggtgccgcagaaggcctttttgagatagggtatcacgataaatcgtgggtgaagggaaagatctttcgtgacactctcgatgtcgccggcaagaaagtacaaaatgtcgcgatcggtgccggagatatcatcagcgacatgggtgatatcggggcgtgagtgaaggatattaacaagggggtaagcaaatagactgaatcatcaaacgaacagaatctttggtctagcattccctgcgacctcccgctttagcagcggctctggccagatctacagcaaacatggaccatatacctcattttatggtaggttcaacctgtcttgtcaaatatgaccgaattcacgacgaatctctcaaacttcgtcagatccgatgcttgatcaaaaactcgttggaggtaattttagtttctcttatgcgcaaaaccaaggcgaattctacctcgacgggtggaacccggacctatctaaaggcgatttcgcttggcttgacttggatctatccgaaggcgaagcgcctggattctggaacgtcaaagcggacgccgtaaagctgaacggcgagattgtgctaggagcgcagagggtcatggtcgatactggtaagaactgtgcgtctttctagctctagcccaatgttcaaggtcatgtaccctacaaatcaggtaccaattacatgctcggtcccaagcaagaggtagatcgattctatcaatgtgtcaagggcgccaagccattgaacagtaagaccgacatctcgattgtctgtcagtgatatgcagctaaagtcatcatctcagagagcttatggcaagtcccatgcaatcagcctgacgtagcctttagtaagtggagcgtcgactattctctagcgggatattgacaaggagcccctgaaaaaagtgtttggcaaccgagactttgtgattcccgggtcgatctttgtcaagcacgccccaagcggctacgatctggatgaaggctattgcgtcggtaagccgtcagccttgactccccatttggatgatccctaacccgactgatcatgactccaggcatgtttctcggcgacgaggacctcgacggccattggatcatgggtcaattcgcgcttagcaattggtacaccacctttgactacaagaatcggcgcgtcggcttttccacacttagggccggtgcatgatcgtacagaggcttgtataaggagcgtgttgcatgcatttcaattcaagcacagccgatgataaaaaccacaaaacatgacatctagagtacggtcgcgagtctgtgtgcgagatgagacaaggcgagacgacgtcagcatactgagcaagaacgtgtgattttcaggccgttcaagggggcagggtataaatctcgttcgatctggttcatctggggtctagcccgctaaacgggtacgtgtgcggttcggtcctgcctcttttccgtcgctcgtctttactgccggaaactgccccagacgatccctacgaaaccgacgatcgatccggctaccaggctgtaggcaatgacgtccccccatgccatcgcgctcgcgtcgctagccacgcgcttcttgcgtttggtcttttccttggacttggtagcggatcgagcggtcgtcttggtcgtggatgcgggcacgtcctggataatacgtgagactggagaagagaccactaacccaatctgcttgaacctgtgacgttgcgtgaaggggaatggcatagggtcatccgtcagcttccgcagcgtgactgttaaaaagcagtacgatgattccggctcacccattgacgtagtacccctccaaggcagcccgtaatgtctcctcctggcctttaggaacgcccgccaagctccatttaactgtagccaccaggggaatgttcagcttgacgtcgaggtgacgacgcgcggtggtatcaaccatggcgaggcctcactcacccaaagtcgaatcacttccctgatcaaacgtcgtcgtcatcgtcgcatggtgatcttcaaaagcaagagattttcgagatgtcagcgctatgcgtcgatgtaggaaagcagagacctgcatgactcaccggaaggccagttggggctcctcagctgccaggactggaccaactttttgcccttttcggcggctacgatcttgccccgaatgttacccgcaaacatctcaaactcggatccgacctctgccgagatctaccctcccaacaacaccggacgatgacgagtcagtacgtgtcgctcgagaatcgtcgtcgcacgaatcgggcggatcaaactcagctggacgcaccttggctggcgcacgggtccacatgggtacccgtttctcgtccgtcaagaacgcccacatgtcctctgcgctggccgccaatcggctctcaacctctacgctgctcgtcccgccgacgacggatttcttttcctcgacgacgggcttgttcccttgcccgctcgtcgacgtcgacgtcgactgtgaggtgggtacgggctcggcctcgacggtgatatcccccggggtggaggtacctgaagccgaggccgtagtcgtgctaggttgaccatgcttttcgacgagcaccttggggaagagcccgaacttttcctcgaggacgggagggaaaccggctcgcaggaacgagcggaacgagtcgtctttgataagagagaactcgtactgatcataggagtgcattctgatcatcagcttcggggacgtgcttgaacaacaggaccccccggggactcacggtgtactcgctatgcccgtcgatcatttcgtgcgagacctcgggtacggtgaccttgccctcgacctcgtctccggcagccgtctttcctatacacgccgcaaagatcggtccgacagagatagtggcatgtgaatcgtctcagcaactcggtgtgccgagtcgtgtgagacgatggggaccggactgacctttccagctcatgacgatcttgcaatcatagatcgtcaggatcctaggtgaagcgaaccgacaccgtgatgtcaatatgccgatagttgtaagacgaaaacgatctcgacgagacccaacactcactttcccttcctctgtccgagatccacgtccccctcgacctcgttcacttcggtgatctctgccgactgcccgtccttgtcgatggacagaccgggaagttgcgtcttgaactatgtcgagtttcacggaaagcgagatcaaaacgtaggcggcgggtacaaataggataggatgcatgaggagttgaagagatggtcgacgggagaaagcgccgcgacgtacccattgagctgcccaggggtaacagttcttgttcctccagtggtatgttgcctgagtctcgccaccgatgaccgagtaccaaatgacatccgtgcgagagacgtagacgcgagattgacgggggatgaagaaacagatgaggttcagctgggtcagctcatggtcgaggatgacgaatatcggaatcctcttcaaggccaagtgagctcacctggaacggggtgagggtggtcggacccgagacgatctggtcagcagaaggcatcctagttttttcctaatttactcgtgagggtatatgtgacgaggtatatgagtactgagttggtaccgagcagatggtgatcacatggacgaacctttgtgctttggtcgtcctcgacatatgattcagtcaatcgtcgaggtttctagaaatcagaatcctaaacaaggttccctcacaaagagggttgagcatccgcggtgcgcgtctcagcgtctattctcaactttgcatccgatcgcgtttcactactcattcatcaggacgatctccgtcgagcctgacctgcctgcctttcgacgccgaccaattgatcaaggacgaacagctcggtctcttgagcagaaacctgcctttgctcagtcttcacccgtagactgtctatatctacaatcagtgtcagagaatactcagattgcgcacttttcgggtgttgccgaaaacgttgatgccggcggtatgttgtcaggctgagatgctgccaaactccaaaggggggtcctttagctcggttgaatggaatcgatggttgctatggttgacgatgaacgattggcgaagtggatcgagtcacccaaagctggacgtgctggcccccacgtgaacacgttgaactcgttcacaaaggccacccacagtagtcgagcttgaacacacttaatcctatacctcgacgctcaaaactctctgctcgggatacagtcccagaggtgaaagaccgtgtgagaaagtagcaatggacccccctcacaaccactcttcacccatccccgtgggtgaacgccctcccaccccagctccggacctcccagccgtctcttccggaccagattcgccgacgactatctctccactggcacaagctgctcaacgaggttcctcatcgccttctgcccaaacggcctctggcttacaggagaggaaacgttctgcttcgttcgggagcttcatgagcaggctcagagcgggtagtgagagcgagtcttccggtgttctcaagacctctgggggaaaggacgctagtatcgccgaggaagacgacgagctcgaatacaatggccgtgatgaaaggaaagtgaacaatgaagacgatgatggtgttgatgacgatggggtacctcacggatccgtcttccctgcttcgcctgaatccgtgacgggacaaagacgagaaagggtcacgcctgcagcgacatcctctaagcccaaagtctccatctttgggttcaagggcatgaagggcacggctaagaatcaaagtctgctcaaagagaccagaggagacaagaagctcaaggtcaggaaaacaccgggagtgtgggtccgtaaggtactcaggggttcgacgtcaagttcgacgccggataccaatctgaccgaggccggagcggcagcgaacgacgttcccgggaccgcaccgagtggtcctccaagtccttcggggtctaccgtacctgagcctaaagagagtccagagcgacctacttcgatcttgaaacctccaggaagtggacgcaacgtagcttcgggcttgtcgaacatgatgacgacgctcaaacccatctacgtcccacctcgctcttaccccctctttcctacatccgacccggactttattcatccttcacaggacctcgaattcgatcgagctgccacgatccagcgcgttcagaagaggtatgacgttctctgccatatcggtctcgccgtcaacttgacgacgaccatcggccaagccgcgggcggggacctcatcgggaattgtttcgtcgccgtacagagtatgtgggggatgattcagagggtcgggctggtagagacgagcgcttggaggttggtcgagcggtgtatcgatctgttgatcgccgtggatgggtgtgtcaaggggatcgcccgggatggacattcgatcggtgtcgatatgcagaacagcctgtctaatctgactgggtgagtatggaggctggctatcggcttgttcgcaacgaaatcaatgtggacacgtgagctgatcagcagaaagggcccgttggcgcaggactctgcaacatggcgccgacctggtcaggaaactcgcagagaggaactttctcaagatcttcctccgatgcgaccagataaacgatggtatccaggatgttacggagcaattggaagattgcgtcaaggtctttcatgtcggtctgaggtcgttgccatcgaatcggaacgtcgaatttctagctgacgccgaacttgtcatcccttccgcgctaaactttatagctacaaacagcgctcaatacggaaaggtggaggatgcaatctgatgcggatcgcaagagggacatggaggttattctggccaggatcgcagaagcattggagaacgacgacaagatgtgagtcctgaccgctttgtggacgggcttggtgctgactctcgtttctggtcgcaccttgcctcaggttcaaggtgctgcaagtcaaaggttagcagtgtcggttcattctctgacacgctacagctggtgttgaacgagcggtctcttctttagcggatgatatgcaagaatcgatcaagacgatacagcgaacactggatgccatcttcgcgctccaaggcaacaatggacacggcttgcaagcccagctgacggcggaatctaccagaccgagctcgaccgcatcttctgtccatggtcgatgttcgtcagcatccggtgtagtggatgacttggtcaccgaagggaattaccgtgtgtctccagtctcgacattcccgaacacaccgggtcatccgattcacggccgaacccacacgaccgtaccccatggcaagagataccgagacgaagccatagcaaccccgatggttcgtgaacacgttcactttctaaaaaaggggtcagtgcaaatgcaggacgttaccaggtcatctcactaatgatccgagattgcgatttcgatagatacgacgtcctctgccgccgaagtgctagctcgctggacggtttgcctaactggaccatcacgcggctggagatcagtcgggatgagcaagtggcgcgagtatcagattgatcccggtcacaagcgcagttcttctgctaacgagccaacttgcacagttatggcaactacagtacggtctggcgaggtacatggcaaggtcaagttgttgcgattaagcaacttgacgacctcacagacaaagatgtgagcagatcgcgttcttcaacgttgattgtagctgatacggcagtcggcaaagctgtttttacgagaggtggagatctggaaaccacttcgacacgaaaacattctggagctatggggcgcgagctacagccgcccttacttcctagtctcgccctttatgcttaataacaatcttctgagcttcttacgctcggaagtgggtgcggatgctcacagaatccgactgatgctaggtatcgctgaaggtatggcatacctacacagccgagacgtttgtcatgtgagtcggtgtgccgtcgttgtcgcgaagatttgacttacacaacgaccgtatctcagggggtgagtaatcgggaaatgatgagtatgagcatgtcttttcaaggcgatcgtcgtgcgggttttcaggatctcaaagccaagaatgtcttgatctccaataatcatgtgcctatgatttgcgactttggtaagccctacctttttgggaggaaagtctgcccactgacttgctcgagtagggttatccgagttgaagatggatatcgagcgcaagtcggtcctcaaacccactggcggtaccctccgatggacagctcctgaggtattactaggccacagaatctcgtttgcttcggatggcgagtctttttgtcaaccaatagacagacgagagcgaggctgattcggcaccactctccagtctacgcctacgccatcacgatttgtgagatgctcgcacccgacgatataccttacggatacgtggattcgcagacggtccgtgccatggtcttgagcggagagaggtgttatataccacctacagcgccgcaaatcaaggccttgatcgaaaggtgctgggaatcaagtgagccggggcctcttgtttgggacaaccacagtggttactcaattcttgtgctacaatcagagccgtccgacaggccttcattcgaaaagatcagtccgaccatcgaagaactcttgccaaacggcgagcgccggaacaccgcttccacggtagttggcgacggtaagctaggcgaagtagacccaagaccgcacagctaacaagatcgagatattgcaatcagattccgagatcacatctttggaaagtcgagacagcggcgacacgcgcacgagttaccagactgcaggcgaggatagcgatgtcgaggaagaacaagaggttgagaagggttcgatggagcaatagtaggcacacgagttgcatactttctcgggcgccgttgacgccctatcatgcagcctgatttccccgcagaatgcggatctccctctggacgacgatgaagaatccctcatgagcgagagcagtagtccgtctgaggactcggtgaatgagcttgaaggcattgagagtgaccgggcggaaaaattggcgcgaagctaccgtcatcacctgactcattcgttcgacgaccgatttcgggagccgttatggcatccgacggcttgcgaaattggcgatattggatacctaacgtcggccggggcgtttcatactttgttcaatgtgaatcgcgctaggcgttcgggtccgagatccagctgatgtgtgcgatgatcaggcaaagcacgggcctccagctagcgtgtgccttgcgttacccattccgactctggcagacgctgcagccggtaccggcctaaccgagagaaccatttcgatgcgaaacgccgcgctacgagctatcgacagtgtgacatcgcttactaacagcgtgatccgtttcgtgtcccggcagaacggccaggtcgaagcgtgagcatggtctcgagcgctgtctaggatttttacctctggctgatcactacggacgcattgcagcgagcttgatatcgagtggacctacagcgtccctctttcggccctggcgcaacccaaacgagcgggactggtgatttacgagggcaaatacgcgttcctcaatgacagggagccggccagggggtatctcaaggccaatgccgaagccatcctcgcagcttacggcgagcaacatcgcatcaagaaagaggacgtgggtgtaggcgcttgtgtcgatcgtgtcgggcggcctgaccgagatcgtgcattaatagatcgtcattgttgtcggcggcctgtttacctctcaatgggctctgatgatggctagtcgggattatggcagtaccatcaactttaacgtgcacaagcagcgacctctaggtgaaccttggggcacgtggtccatcgtgcaggatagcaggaaacgcctcgaaaccaacgacgaggccaatgcaccgcagacgaggttcatcaccaaggtctccaagtcgaggtacggtttcggttcgaagcagtgtgcgtgtcttgtcgttttagctgaaacatacaagcatcatgcgcagcgactcgcctcaagcggtgcttttagccaggttgaaattccctgcatccgggatcaatcgagacgttccgacattgcactgatcttggtccgcagtcgatacgatagcaacccgaccggttccgccgtctttcggcaggtcgctggccctgagcggataaccactaggagagacgagtccgacggagcagcttggctggagatacctcatcttgttgtatgaatctcgctttggaggagcgcccaatctatgctatcgatatacatacattcaccatatcaggccgtgcgaggccacgcatctacgatacaaaccggattctgcggcatctatcctccgtgtagtgtcgagatgaagacgatctcgtccccgtcctcgagtcggtagtccaattctccctcgagttcccaatcggtatcgttgactaataccaagatacccggtcgcctgggggtcacgatcgagctgacatcagcctcccaaactcgagggactgagctggaaacgaaaaggggccgactcacactccctctccatccccaaacatttcgacccgttcgctcagcaagttttccttcatccacttgatcaggtaacgcatggtgactggtgatccgtcctcggtgatcttgggcaatttggccgtgtgctttggtttggacgagaagaggaggtgcagtccgccgctgtgatgaaagtcgacgaggacgatcatcgaaaaggcgaggcgtcagtctttattgttcgagtgcgattcgacgaccgggaccgagacccacccgaattcgagcttgatatcgatctcgtcctgcttgaccgacttgacctgctcttgtgcttgcggctgttccactttcaacccgtcgacccccttgccgagtcgctccacctcgccatcttcgtccgaggagggtacccccaactcgcgtacgtctgcccatttcgcccattccttcctacccaggctcctcagcgccactctgacgtcctcgttgatatcctcgataagtttctccttggagacgtagttgagttcaggccggacgtagccgaggaggatgacggagagggggtgagagtagaacgaggtgggaaattgatgcataatatgaacttcctgtcgtcgtcgtcgtcatcgttgtcgcaagacccggaaatgcacaagtaatgtcgtcagcgactcgcacaatgggcatcaggaaaacatcgtttcctgtcgaatcgcatcggacagactcaccgcggtcatctccttgttcccgtaataaggattataccctacactcatgaccatgggccatacgttataatcctcatctttcaacccttgcgcctcgacatcgaagtcgacgttgacgttgacgtcacgcgcctggtgctgtccaggttgaggcttgtcgttctctttaccctgtacttgggcttcggggtaggcagccgtctttcccggtaaagagtggatggtttggacgctcaatccctctgagcccgggttagacccgtttgtcggcttggcagtggtggtggtggtggagttgttattgctggagaacgacgacgacgacgaagggatggggtgcaactttgcaaacccaaagtaaatccccgtcgaccccaatcgttccagcgggtcgatagaagatctcggtagattcgccgtggggatccctagttctttactcccacgtccaaagcctcgttcgacgatcccgtacattttgatcgggtaaggaggttctggaccggactcggtgccgatgatcgaagggcgggtcggggtatggacgggggcgacgtcttgggtggacatggttggggggtgtgctcgtcaccggtgtgatctcgtcgctcgacgtagtggacgtggggtgagaggtggtggttgtcgagaatatcgagtgcttttacgtgaattccctgatgatccttttggtgtcgaggcaagcaattgctagatatagttgggggtaggttgacgatataaagatccggttcggatacaaaaaaatccgaaatcatagccagccagctagccatagtagtagtagtggtgtggtagtaggagtcatattagctggccaaacatcccaagagctggacatctgtttattagagcaaagaaccacggtcccgtgacatgactctctgatccgatgccagcgttggtcgtggtagccagttctcactgtaatcaaaaggtcgtccgtcgcctgacgatacgattgatgcgactttgtgaatcggccggcatgcgcgcggggtagagcagagtagagagctttggtgccggtcttggacgagtcggatcgggttgggttgcatgtttactgtaattggatcgcagtccccatttgttgggggtcgtggtcgtggtcgtcgccggcgtaaaagggccggatgatgacagttgagaaacggacaaaggtttctgaacgagatcaaaagagattcgggtagtcaaagctgcaaacaaggtacagaggagggtaaggagtgagtatcaacgaccacgaccacaacaacaacaacaaccaacaacaacgtttgaatattcgctgctcaaatcgtcgatcaacaaccaaaaaaggtgatcgtttcgaaatatacgcaatcatatcaacccgtcaccgcgtcaccacatatgaacaatcaccaccaccatcatcacccaccaccctttcaatccaataatatccgcctaccatctccaccccgcccacctcaatctcgaccaaccactctcacgtcgtcgcccaatttaagattcggtacggatatcgacaagaccggggaattggtctcttccggaggggggaacggctcatcggaagcaaattatcgaattcgacctacaacatcgacctgttcgtccacctcgtccatgtcgtaccaggcagcgatcgaccggatgagatcgagctcgacgtcgagatcacccgtcaagccgaagccgggtcaaacggatagagcatccggtgggatgggcatgtcttcgttcatcgggtttgaaagggacgagcagcacgtcgtgcgcacgacgcattcaccacaacaaccacaccagcagcagcatcagcagcaacaacgaccactcccgcacttcccgtcccactcaccctcactccatccatcctcgggacaagggtcccttccataccgagatcgacagaccggacgaccttcttccccgggaccttcgaggacgaacgatccccggcgaccatcccacgtccatgccctgtccgacctgttggacccttcaccctcacccccacctcggtccgaacgcatggccggggacgtcgtccgcaacgacgccgatggcaatgtcgatctggatgtcgatatcgatggcgagggaggatcagggataggtgggagtgcggtgggtacgtcgggaacgcctaggcctgatcatccggtcgatggggtgagagacggtcgggaggtcgccgtgacggatgatccttcggttcgggctaccgaggtcgaccatgaggaggacgatgatgacgaggatgaggacggggatgaggatgacgaggacgaggacgaggatgatgaggacgaagccgacgtcgacgcagatgcggacgaagaggaacaggtcgatggcgagatcgtcggtcaagacgatgatgaagaggaggacgaggacgaagacgatgacgaggaagaagatgaagaagaggacgacgacgacgatgacaaatcggtcgacctttccgatgacgaaccggtcttcatctcgtcgagaaaaccgttgacgatggatcaactcctttccgcaccgtcgtcccagacgaacgacgacgatcgagcgatcaagaaacaggggtcgatcagggtcaagcaggagagtcaagacgttggccccgctggactgagccagatcgacggcaacaagaacgacggggacggtccggatggcgacgtccagatggtgctcgtcgacctacctcggtctgccgaccagactacaaatgataccggattgattctgccccgcagcgcgtcgacagaggccatgcaagtggacgaacagacggtcgccacgcaaggttcggtcggcggtgcttccctccccgaatcgactttgacgagcctgccggactcgtctcggggtactcaagcgggagccgcggcaacgacgaccacgacacaaacggcaactgcagcgactctgacaggcaccaatgtgactaccggaccgacaacgacgaccatcgtcaagggaaagaagaagcgcgccgtcctgaccaccacctcggccgtacccgaagcagcaccaccccagcccagggtgatcgacatgaagaccgttcgtttggaatttgacttgctgaacccgaccgcatcgaccaacggcaagacgcccaacaaggagaaacacgggcataaacccctgatcatcaacttcaagcaagaagcgatcgatcgcggggtcgtggaaaaggggtactgggaggggttgtggggactaggcctggagggagagaaagacgataacgcgagcgatggggatgccaacgatgatgacgaggacaatgacgtcgatatggatggcaaggctgcggggaaaaagcagggcaagagcaagttgtctatcggacaagtgcccggccccaaggctggacccggtccgacctcgtccttggccgccttgatggccgcggtcgatgacgatccttcgaattcggtagaggcggcacggctcgccgccgagttcgacaagcgttacgaagagcagagcggatccaagacgacgacaactgtggcgacgaagaaacgcacacgtaaacccaaggaagacgggtacgacgtgggggatcctttcgtcgacgattccgagttgatggtggatgagccaatgttttatcaagaacccaaacggtccggtttctatgtcgcgatgggggatgtcgagctgtgcggagtggtcgaggacgagtaagctattcgagagaccgcattgcagcactgcctatttcagctgacaaatggcatccttgtaggccaaccaagagacgccgtaagaagcgagccaatggagatcaaccgtcagagggagaccaagcaagcgctcccatgaaaaagcgcaagacaaagacgattctcggaatggggattcgaccgggtatgctctcagctgaagtcaggaagagcagcctgaacaatttggtcgaaggtacactcgtttcctcgggagctccgatcgccgagtcgaggcaggaaagccccgaggttcaaattctggaaacgcagagaaagggtgggtttgcggggacgtctcccgcaggttggtagccatgatctaattcccccttccatatcagatgagcccccgatgccataccagatcatttactacggttctcccgtgagcgtcagtctgctcccgagacagcgcgcttcgttgacatcccttaactgaacaggaggaagccctcgctgctgtacccgaggccatacatgcggaactgctcgaggtgcttcggacgagtcagacatgtaagctcggcggtcgacaccctcggcacgatgatgctgagcagattccccaattcccaggcgaccagtcgaataaaaagtcgttccctgaaaccttggtagcaccatgcaaagcgctcggacacaaggctatcgacttgcgcatcatggacaacccgttcttcgacgtgatacccaaattcatcttttacaatcgctttaccatgcgtcgatggcttctaaccaattgccgggactatgtaccgatctcgatcgccaatctcgaagacaaaattttgcaacaaatgcagaccgaaatcgacatacttgccatcgattatacgcaagagcgagatgctctgatagaagagagtgagtgcggcgtcggctcatcgttatacacgcactcatgacgcacgtacatacagtcaagaggacgtcaggcgaaacggtgcaggagctagatccaatcactggagaagtggtcgaagtgcctgtgggtgtacagccgcttgatgatgtcttacaacaagatcgctcaccgatcagcccttctgtcaggtttcgcttcccccgaaaaaatggagatggactgccagactgagggaaatgtttgcggcttcggtcgagaacgtagagtacgagatcgattacgtggagaaatactcgtgagtcaatggtcaggccactcgatgcgcggtccagacctcgactgatgggactgatcgaccaattagggaagcaatggctggaaaggcaaaagcgcctatcgtgaagccaaagggccaggcgatccggaccagattatatggtcgcgtggtcgagttattccctgagggatggatgaccacgggattgctgtcgcgagaaagtgaatcatcgctaaacaggctgttcacatcgactcgagctgacgtgtcttttggttgcatagtgagcgcgatgaagaccaagaagaagcaggtccaggcgtaggggcaccgagaacaatgagatgatgatattcagttgtagagatgacgacactcttcatgacgatggcgcatgtcatttggcgtttgtaaaaaacttgcacacgccatgcattgcaacgataccaattcgactacgacgcaatgcgggtgttcttaactcggggcggcttgacgggcgctttccggcctgtcaaagattgtaagattaggcgaaactcgtgcagcagaccggagggatgactgaccggaaagattgttttgaaaccggtgaaactgataattctcgtcatccggcttcaaaacctgtcaaattcatgcgtatcagcagtccgatccgaggacgacagcaattctgtacttgcagcaaagctacatagcaagttctcgtcagcggtcatgatacccgcggcattgtccatctaaagagaaccgtattttgtcaggaatgctccatctcgaaagccaccgatgacgtaccgcgccgctatagttcggggagctgaacacagtgactagctgccgatttgcgaaaaactcgtagccctcctgggcgacctgatgagctctcgcaataaggtcgagatcgaatttttgcaagaatttagacactatatcggggccgaaagcatacctgttccgaaaaaaaggctgagctggaggttgctggatggtatcggtgtcgagctttacccagcgcctctgtcactagggccccaaccgatttgatctttcgctgggtcgctccatagtagatcgcagagcagtcctggttgattggcacaccggttcagctccattagcgaatcttgcggcagagaatcacttacccgagtcggggatctcggtgggacgcacaattcttcgaatatcctcgaggctgtgcaagtccggactctgataccaagctttcaattccagccgttacacttatctcgggcgaactcacaatccctccgtgcatacagagaatccggtcgctgaccaatcctgctaccgggaggcagttgaatgtgtccgaaaacatcttccatactttcatattgtagcggcgcttgcctggcgggatattcgagatgtcagcttggcgcaaccatatgaaacgcttggcacattacttgcactcgtctaggaacccatatcgctgaaacccgatgcatgggtaagtccacgcataatcagtcggcaacgatgctgaactcactggattcacaccggcactttcgtgattacctctcagaggaaagtaattctctggatatttaattctgccaatgcggacgaattgagtgccggatcgacgaatgggctcgaagacagacagcaatgacccacttgtaggcaaacatcaaggcggcacactcgatattatgtcggcctatctgtgggcatcagttcaccgctcttccccccggcagtctggtttcgactcaccacgatcgacgtagtctcccaaaaaaaggtagttagcctcaggcgggaatcctcctgcggagaatgtgagtaacactcgaaagacaaccatgaatgaacttaccgaattcaaatatccttagaagatcatagtatcggccgtgtatgtctccgcaaatcttgatgggcgcctcgacttctaccagggtaggttgagacataaacacttcgctgtcggccaatgatgatcgtcggtacgagagcatctcgcctgtgttcagagaccttaccgagctgcgacacatagatacttgatctcttcaaaggttaactgcacggcaatatcggtcggacctcctctcactagattcgtaatagtcaaccatgtggagctcctgtctcagcgtaagaatgcagatactcgcctgacaacaatttggcaataatagcatctatatcgtaacgatgaaagatcggttctaggtgatattcatcgtgtgcccgcaaggctggtgtgggcggcattgtagttcggagtgctgtaatctgcaatggctgaatgaactctgccgatgtcagcaaaaggcaggttgatcctctaacatccactataaaagcgaatcctttccctttgatcgagatttttgcgtatgaaacacgttgtccctttatgatgaaccccgtcagcggtcagatgtcgttgcgtgatcatcgaccgttgtgctggcaaatttcgaattgattttcaagtagacatagagctaatactacatcgaccgaatcctttccttgcgaacctcacttgcaaaccgctgatgaaaggcctatccgtaaaccctgttgttttgatgagagagagatgagtttcgcctcgaggatggagaagggatgctggtgacaatgcttacaatcggaagatatcgttctggctgtgatagtaaacatccaaatcaataacagggttgcccgacattcagaaatcgagcttacacatagtagccacctggtagatacgaagaaaagagaggaatgtcagtccgaggtgcaaataacaatccgctctaaatcagacttgccgttgttgtcgggaacgagctgcaaccacgagggataagataagcgatttcgcctgcaggcagtcgcacgagcgacggctcacctggaacgtctgactgtactgcataggctgcggcgagtcatcgacgatcaattggccggtaacgagcaccatgagcgaagcgacggtggccgatgacggttgtgcgtcagaggtggtgaccttgtgctggaccttctcaaaaggaaggctctacgagtgggtgcgcatacgattagtcaagcaccacccgatacctcaaaaccactcacgttcagcttggcgataatagcggtctgtcccatgatctgctccccctcccaagtgagcatcgagttctccctctgtagaagaagactgtgagctcgtgactggagcaatactcattgcgtggaactcacgtagagaggggcaagagacgatcggtccttgccgacggagtcgaacgtctgataatagtagtctgataaactcgaagatcagtgctgagattagggaagacttcaacgctggccgcagtcgacatactggtgaactgcaggcgaaaggaagtcgaaaggttagttagctatcaactcgtagctggcttccaatcttgcgagtcacctgggtggcaatagcttgaatgtcgctcatgatgggcaagaatagaagcgatggtcgggtgactgcacgatgtaggaagctcgaacagagatcattgccgattccactaaagacgaccatagatcagtcgctcatctagaccgcttcccaccattggaggtcaggttgggggagaagtcagcgtcgctcgctcgcttgcttacttaatcaaatcgtcaacaacacccctagaaattcgaagccgaaacggggcagaccccgggttggtccttgaacaaatacaatatcatagcgacccacgaccaataacgatactatttgtcgtgcaaacacccttatacaaggctagaaatacagtgcggaacgttgcttcgcagtccgagcgctacgatatagacttgactgtctcctgattctgaccttccaccaggatgggcttgatggggttaccaataatggcagggccaatcttgcctcgggacatcagatcatgagaggtctgacccgaaaccttgcggttctttgccgaccgtgggacatcatcgaggagtaccgaggccaggctgatggtggattgggaagtcggcaaaaaagcgtcttcttctttgcgcggaacaggtttgcgcttgatggatgttcctggagatgtcggcattccagcggcatcgcttgcgctgggcgaacgagacgtcggaccctcggctcgcatcgaggttgtttcggccgattcgatcgtcggagctgaggcagtgcgaccgcgggacggcagcgggttcgagggagaacgcgtagcgccgcctggtggtggtacaatcttggtgagcgaaggtaaaccgttgccaatggctggggtgatcttcggcgagctgaccgatcggccgtgtgaaccgaatgaccccttgaatagacgccgaccgaatccaggcgtcttgggcgatttggcggacgttgtctgagtcgtttgactagaacttccgacaccagtcaatacaccgaactcgtcctgatccggcgtaggggaggatattggcattgcgggacgcgttgcggaatcggtgtttgcttcgctgaggatgatgggaccactgatatgcgttacagtcattccgacgtcattgtggtcgctcttgtcgctaccttttctctggaacagcttgttcagtggcccgtgattgaataaagacttccctttgccgctattcgatcgaggtcgaccgtcagagctcaaatcaggcgacatgccttccgtggtcacgaaaggcacggcagtctctgctccttgccgtgaggcgtcgcgaagcacgaccggaggagagggtgcagtgaattgatcgaggcgcggcgagggaggtctcatgggtctctgtggtcgccatcctccttcggcagaaaggtttgtttgcttcgggacatgttcatactccattcgagccatggtctcaggcgagatcgagacgggagtggttccatctgggatgctccttggggtgtacttctgatgttcagccgtgagtgtggcgtcgggcattgctggtgaagttcccggcgtaatcgcaacggatgtttcgaggctacaggtgaacggtaagcgtgagatacgtcaccaagacctcttattcagacaatgatgccttacctagattgagcatccataaatgctacatctgaggttttgggcgagacgtcttcgacacgaggaagcggcatggctttgagacgctgcggctgagcagcagacggcccaaacacggacatgcgaatttctcgtggggacagatccttcatggctgaatgatgaagggtgcggacgtcagctacgatcgcaatagagactctgatgtattcgacttgcccttttcgagtaaatcgagctgatcgctcataaccaaagaacttccccgcttgtcgtataccatatccaggcccatcccgagtccgaacatggctggcttggcagtctcggaggtctcgattgaaagcttgtgatcttctgctggagtgaatgatagcgagggcgtatcaatgttgcggtcattggtcacagtgttgggcgaaggtagattgatagggctcgcaagtcccgtgttttgttcatcaggcacgctgagcatcggcgtttcaacgtgagtgctttggctgcgctgcgctagcagcatcgttacttcttgtaagtctgaagaaggcgtgaaatcttcggctgattgtcccgccaattcggcgtttgatatctcgtctctgaggatcacattgctaccaatgtcatcccaaccaaactctgatttatcgttaacgagccgatccgcgcggagaatagcaaactcctcgtcaacatcgtcaggtgatatgttgtcggcactatactccgagacttcgtcttcttgggcttcggcgagcggttcgtcgagaggttcatcgtcgagctgagcgtatgctgggaggctctgctcgacgctgcgatccgcatcacttgcggcaggcgatcgaggcgttgcgtatataggcccggatgtggatgccatgttggcctgctctgtgtctattgaagggatcccagaatccacattcttgctgttcgtatccttcccttctgttccgagcttgagttttttcaatccaccttctagagggggatcatgcgccgcttgcttgcgcttcctccaggcttcgtaccacttggctcgatctcggtcgaaatcgaattccaccttgcctacgatgcgactcggccgctgcattggttgaaaaaggtttcgagaagcgtaatccgacgtgggactcgtttgattgtcggtccaagtcgaatcttgacgccgcttgcgaggaggagaatttgtctgcgatgctgatgcggacggcgccaaagaactgcggtggccgggcgagttgccgggatctgaagtgtaaagttgaaaagacctcgcgctggcaggcgtcaagaacccctcgaacaagcccttttgattggtattcgcctgaaatgggtttgcatttgggtcatctgtcaagtcctctgtaacctctggtttgtcagacgaaaggcttccattgcgggctggtataacagggccccgaggggacggataacgtgacgaaggtaatctgacattggcaggattgaagaggtccgcccagaggattctccaagcttccaaggaacatttcatccctccctcgtaatcatgactgtcccgttcctcttccagagtggaaaacggtctttcttcctcgtcgaccagataaagcgtcatgccgattccgctgggcaagccccattccgtgacgatgtccttgatcatgccatccatggtgcctcttagcggtaacaggcgtcctctccgccatcgtcgtaattccttctcatgagacgaggatgctatcgaagagtcgaatttctcgcttgggtcttcgaggttgaatgctggactaaatcccgatggcacgaatagatgatcagggggtatgacctgaatcaggtgacctcgtcctccaagaccggcagctcttcccgctccgtgcgctcgaccgatccggcttgtcgatgcggcagatagtccagatctcgtaggacttgtcaacgctccatgagcggacaccttccgatgatttatcgaacggtccgtcatagatgtccgtttggaacggatgtggcgactctgcgccagcattgaaggaccagtgctaaccagacccatggcttgagctatcctggtgagcttcctggcatccatcgtaggaggcattgatcttccggacgacggaatcgatcgcatagagatctcgccagactttggttccgaggccggcgaagtagctattgtgggtatgttctcgattggcaagtgcggaatagccaaatcagctggaggggggacgatcgtcgtgacaggcggtatcggtaaggggttctgggcgaccggggaggccggctgcatgctgttcagagtgtcataactcgacctctgtgattgagcctgcctctgcctcgctctccgatctcgcagagactctttccttttcggcgtctcgaagtttgacgttggctccgtatgcttcggtgacaaaggaggagcgtccaacggtgtctgaccaatcggaaccacatcttcgctaacgggcaagctttcgtccgtcttgactctttcgaaaattgacggtctgtccatggtggacgcagggaaattcggcgttgtcggcgaacggtatgcgaggctcaatttccttatgggagacatggtgtttccattatcagctccggtctcttgaaagatagatagcccttagacaatatcgacgtctggcaaagcgtatacgcgatacgttatgagcagagttctaagacgagcttgccgatcttgtggactatgatcactgccgctgcatggcggaattgcgtcatgaataccgactcgtagcagataggggtttccgagccgacatacagtttgaaacgtggaagcgattcgtttgtttcccgctcccggtaaacgtttttgttgtctctgattccgcagctcggaatgagcgaacaagccgaaagggtaagggtcaccgaggctcctaggacgacattatgggaatatgaccgtgagactggcggccgtgtattacttgagcagttgcaattgagagttcgagttcgagctgatgagcgatgacttgttgaattttacacggcctcatggacaatcggagcaaggtgagtgcggtggaatcctactcctagctagtcgctcgccggatacggcttccggagcggatgcaaatttcgggaaaggtgtctcggtatcggaagcattttgtttggctaaagtcgcccaatgatacggtatgcagaatttgttttcgattaccgatgcaagatatggattacaagcgtctatctagcgattcaaagtgagatcaaatcagaggctaggatccggggtatcatgcaaacggaagagcaggcaaatgtccatttgattcgcgagacgaggaagatcatccgtgttataagtactctacgttatgtcgtggggtcgtgatcgtgatcgtgatccgatgcgaagcgaatctcgctttttgtcgcttttttaagggagtgaggagagaaagggaatgaggtaacggtagaaaggaaaaagatcaagcgagcccgccgtgctagcggtgcctcgctatgcttgcggtgaaagcttgtcctaggaattcccttctcactacctcggtatttccgaatggtgtctttcgatgtgaggtaggtcgtgatgtcgtccgccgacgtgtttactggctgccagtgctgcggcagcctcgtaatgtactttagcatggcgtttcaagttggattgtaccgaaaattgccggtggcaatgaggccagtcgcacacgtagggcttctcgccagtgtctgaagaaagaacatgcccatatgagcatcaggtgatgattcgagcggtggatttggtgtactcgtagcactcacgcgtatagatgtggatcttcaggctgctcggccggctgaaagtctttccgcagaaatcgcagccgtacctcggaccaacgctagggttcccagacttgtcccggctgatctcgtctgtagcatgagtcaggaccactccatgcggaatacctaatgtcgcagtagcttcgaggttggtagctgataatgacgcccgtctgccgtttggatcgggcagcggtagagtctgatgttgaccagggcgaaccaaatgaggaaacagtggcgctgcggctggctgctgctgcatatgggaaggattttcccgcgttgtctgcgcaaaactgtcgattccaggcaatcgcataccgaaatacccggtggacccaaacttggggtcctcgatggctcttagcggagacgagctgcgactggccaaatcctctgacgtcgaactaggggcgtgactggactcccttagggatgcgtgcatcgtcaacggtgtcggcatcgccgaggttgacggagttgcggtgtccagagggaactttgatgaatgcccgaataggccctggctatatctagacgcgccagattcgctcggagtctctactgtcgatcgaatgctggagaaggacgtcatcgatcccagaggtggcaatgtgggtcgcgcagcggtaccaaaatccctcagattgagcttgagaagcggagtcgattctgaccttccgaagaagttggagctcgcggtagcagcagtagtagcagtcgtagatgccctgtcgagcgggtcggactcgcgtcgatacgacacaggcgattcgcatcgcgatgagctgccttttcgccgtttcgaacagcgctcgtcgtctgccgtgacgcgtttgccttcgcggacaccgaacaatggaaaagaggacgaattagggactgctaggaacgacggacagatggttaatgtccgacagggtattcggtgattggttccgctcaagcagactcactatatggtcgaggaccttcgtcatcgaatgtccactctctctttgcatccgtcagcccgtcaattcccaagaccgacgaccctgaagctgttcgcggcacgctccgcctgttgagatcattccctcgaaacctgaaggcctccgaaggcggacccatttccatatcttccaacccgtctccgtcggaagcatcttcgcgtagggatgccagggtgttattcgtgctcttatcttcaagttccaatcccatcgtccgtcgttccaatgcgtatgggagggtagcgtgccacgagcccttccgagggtcgctccctaggctgttgtcgcgttcggacgagaacgagaactcgagggcgccccggccgggggtcatgatgttcagactgccgaccgaatctctgtatgttgaggcgctcaacaagctcggtgcagtgctcatagatccgccggtagaaacggtgaaactccctgaatctaggcgagagccacgctggtacgacgaggaagatacgtcggtggagctggaagttctacgatttgtcctccagcggtctagcgtggaatcggtgcgaccaggaataggtcgacctgccgacgggacgaaatgtcaacaacgggccagtggtcgttctgacgttggcaaaaagacttacctgattcgacttcgcctgccatggtgaacaactctttgatgccgggaagactgaccttggcctcttcccctccagggccagcacgactgttcgtatctagcttgccatccgtctggctcatgacgttttctgcccagccaaatgtccgcgtcctagcggtagagacctcccgttgatatggggacggacccggtcgggcaaagccatccatcgtctgattgcgagacacggttgtcgggacgggatccgtgggtccaatctgtgattctcgtcggcgagatccacaggtcgaatcggcggcttcagccacttccatgtccgaagcagcgcgctggccaggagccgtcggggacctggtactgcttgctccggtgtgaatgtcgataccgcgcatagtcgtgcgtgatttcccttttatggtgacgaacggctcgttccagcctaccagggacggcggttgtgttgcgtcctgcgcgggcggcggagatttgcgagggggtctggacgaaaatggactgaatgaaacctgtcgagcagacggttcggcgagtctgaattcgtcggctgatgttacactagctctccgactgatgtcgagctcaggacctggagtgaagtgagccaaaggaggtcgacctgtatgtcgcaagggaagagggctggcgttcaccggactggctggatgtggagtggcgcccaagaacgatccaaatcccggtggtggccaattgactgcaggtgtgcggaggctgctggcgtgatatcgttttcgaggcagaaaggatgaggatgtggaagatttatgcgcgcctgtgacttgatgccgtccctgtcggtacagggtggtgacggctcctgcagatctgtttacaattctgcgattgggccaggtagagggcgttgcagagttgtatggcgatgaggatggatcaaaacggtcatcgacagcgccgaagcgacgttggagtgatgaagcggtcggagagtcggacgatgatgtcgacccggaacgtcgtaatggggattgatatcgaggagaatagggtgtcgacggtgaggtcgataggcgtgtatcatccagatgcagtggtagtgggcggccatgtccagatgatcgtgacggtgatggggtacgaggccaaggtggagcattttccgacgattttgatgaatatgggtgccgtggagggggagtggtcggtgtgcatatttcggtcggcgcggacggttcggcaaggcgttgatcagggggagacatcgccgacgtgtcgtcatcgtgatcggcgggggagaagacgagatgaggcgtagagtcgttgttcgacgaggacagcgatggcagtcgtgttggaggcgatgatggcacgatgatcggtgatgacgaagtcatggtcgttgagatgaggggagggagaagtcgagaaagtgacaatgtcagcgtactattcggtcgaggggtgtcgtattatgacaggctttgcgtgatgaccgggatccgagcaaggcaagaagcaaagacaaagctgcgaaggggaatgattcgggatagatgcaagatgcatgaggctgagagatgaaagaggagaaatgggcatctcgatgaccccacgcttatgaaccttttcggatcgccctcctcgatcctttcccgatcgacgtcgaaccagttccttcgtcgagatacgatcaaggttccgatcgacaggtcatcatctacacacacattccctcccacagcgacgaccatcaacgttgtcgtgtcgtcgccgctccctgagtcttgtactcctggatcgagatcaatcctcccagtccacaactggcctcattttcccgccgggctactgccaaaagtgtcttttctctcggttcaactctgctcaaggtttcgtgtgcgagacaggacacgatccatgagagggaaaggcttttttcactttgcccttggacacccgtcatccccacggtccgccgtcccactctgccgatctcatgagatcctcgtcctgtttctgccggaggctttgaccatccgtcgtcgaaacaccccccttccccttcttttttttccttgcaacgtggccatcgactttccaagctcccaaatgaaatgatcatcggccgatccaccgttcaccggtcgctagcggaggattgtcggccatatgcaaagacactttcgggcatctcgaagcgaaaatcttcgaaaccgtatcattcgactcgctcccgcttgcagatgggtgaaacatcccttgggctagaagtctcccatgaatcaacgcctccttcgtgcccgacccgttctcgccgtggtcatgatgatcgagatgatctgatcgggttgcgtttcatctcacttggttcccttttttgatttgcttcaaccggtccatagaactgccagcgaggcgtctatcgatccttgattcgcttttgagttcactcgggatgatccgtggcctttcattgctctatccagccgtccagggcgggactatcgaaacgaggcgtacacgaggagaccaaacaaaaaaccactgacctagttgaaacaccgccacgaatccacgggccgttccaaacagtaataccctgacgttccacttaaagccccttgtatccgtcgggaaggaattcgccgaggattactgaaatcctcttgtttgatgcaggtcgggtcgaaaagcacaagaaggccgtgatatgtcctacagcacaagatacgtctcacagtccgatctaaagtttatcctcttcacgggtacgtgtagagtggtgtaatatcgatagtcgccggcttgctatagcagatacaacgtcgatcgaaggaggaagaggaccgtgtatgctctcccacagatgatcgacgtaagggtacatgctatcaacgccctttgcgaaagtttcaaccgtatcaaaaggtttgctgatcatcctacaacgactgtatgggtccgagccaacgatcgaccgccggtggccaagctagtggtggatccgtttgtgggggtgggaaatggagactttcagaagagcgacgaagatactagcgctcatcccgtggatagtgctgatgaataccgagcgcgaaggagatgggaatccctcctctgttcgtgggagccggggatcggcacgaatcacaaagtggagggtggcgtcgcgatgttcacgtagggaaatcggagggactctccacgctgccgggcccagcgctccagttaacccgaaggacgacatacatgcggatgctctcccttgcaaagccggcgcggcgcgtcaaggccgaaggctccatgcatcaagcccctgcccccaacgccgtaagacatcctgccgaaggcttcgcggcaggtcacacagaggtgtagcatcggaatttacgtttgcttccagtaattcgtgggagggcggccggcgggcctcgtaatgatcgacacatttgcgccaatcgtttgctcgagatcgaagcgaccggtgatcgacggaacctcaatccacttgggaaacgtcggagattggcgtggccacgccggagagtctcgccaccatcagtacgtagaagaagacacatgtccgtcaatagacaggccgtttcccgccagccttcgtgtggaatccgagagcggctgacgcaatagggcgatccgttgatcatccgccgatctcgagctccctcagtcgaggatcgacgggcgaccagcggagccgcggccgggacctcggtaaagaccgaagaacgttttcgatgtcttcaggtaccagaaacccgcaaatagagacgcctttccgcgccaccgaattacacaggcaccgaccgcgattcggttcctcgtaccctgcgaattctacagattggcactacgatatgaatcgccgctagaatctatgtagcgcaaatgcgctctcatcccatcctgtaacaatcgaaacacgcgaacaacaatcaggcttgacgcgaaaccctaataaccaaatcgaaaggaggacaaagtgtaaagaaaggaagaaaatattacggcaaacgcatcattgctggttcttgtcgccagaccggatacccatgccgttgtcagggttttccgggaacgggaagctcgctctcgtccaccgctgaccatgtggtggcgagggtctatggatgttgctagtaccgtttccataggtgccttgttgttgtgattgttgttgcgatacgcttgctcggtgcgatatactttttcgcagatcggtcgaatcctccatcgagtcaggggccctgtatacgctgttccctgcatgtgggaatgggaacgagggacgatgcctacaacattggctaactcagtgcggattcgaggtatacatcagtgcaaaaaaaaatctcaccatctggtccaagcctccgagccgggtccgttgttattgctggcatccacggactgccgtgacgatttatcgaagggcatagcgaaagagggcgacatggctgatgccgattttggtgtcgtcgcagggggcatggtgggataggcgtctagcgcatgatccattgcccccgaaccgttactgctcccgtggaagactcctccaaaatagtcatccctggaaattctcttcactgagttggtctgccctggaacagtctcctcgatcatgccgtcggcctgtacgaccatcactggtccatgagtccgcttgtggttgccctcggtgagaggcatgctcacggatgcggcccgggtgcccaggtcggttcgttcaaggccaggcgatgcagtcgtgtgcaaacgagcatcaagactgtagcgccctggaagcttgctgctcggtcccgacgtcgcgggatccgagatcgtattcgtcgtagtgacagggtccaactgtccggggaacgtagcagatcccggtgtcgagacacggccatagggacgggcgggaggagcaccgtatcctattgaacccccggacggtcgtgttgaagctggagacgtattggcagacatggtgttgggctgcatgggttgtctgaattgtgcatgtatcccgtatccgttgttatacccgccaaaggattcatcgtccggcgttacaaccatcggtcccccaccatagctaggtgtgcgaagcattgaaggatggttgccgtaggtatgctgcgcagtcggttgaggcatgtgatgatgatgcggaggcatggatgaaggtgccgtgtttgatggcgaagctgacgaagtcttgctggcctgataagcggctgtaggaatcgtggtacaaaatcatcatcttagctaaacagacggattttacgattgtacgctcgccggggttgcttacgattggccatgttgacgttcggatcgtcactcgctttgcatcccttgaccagccaatgccgacgaagagcgtcctttcgcgaaaatcttttgagcccatgcgagcgtcagcaaccttgagcttgggggcatatgcgcttccgatcctggcacagccggtacttactgtttgccacacttctcacaggcaaatggcttgacggcaagatgtatccgcttgtgtcgcttgaggtcgtgattccggttgaagctctggacacactcgtcacatttgaatggacgttcgctcaatggggtgccccgtcctccaaccatctgagcggcgttatgaggcatgatctgaccattcgcaccgatgaccaggactccaggtgtgttgccggtagccgagttcgactgagggccagaatagcctcctgcagctcctgaaccaaggaaggactgaccaggcatcgcgcctggggcgccgggcccttgataatgctgctgagcggggtaagattggtagccaggtgcatggtggtgttgaagatgcggagcgtagccggggggtatgtgcgcgtatccagacggagagtaatgatgggcgtgggaaccaggcggatacatgggcaccgcaggcgaggagtatgcatgagggaaaggtgggggaggctgcgcatgcccctcatgacctgagcctggatatgttgaagcgccgggttcgcccccttgactataaccgtatgaataggctcgtgcatagttgtgacccgaatttgaggcttggatggcctgatacggctgtgaggcgtagatggaaggcgacgacgttgccgggtcctgagagggtaagactggcagactcgcagagtgtgccaggatcgccggtcgagtaggttgacggtctgaacccggataacgcatcgcttcgtctgcgggcccagacgcctgttgcgtttggggttgtggcgagtttgctccgttgatcggtgtttggttgtgacccgcctgcccggggtactgactggcacgtctctccagcctttgagcatattgccctgcgtacggtgaacccgcttcgttgcctggtcctactgaagccccgggtgtttgcagagtagacgaattgctgatggatcggagatttagaggtgcgggtttcggatgggtacgcgtgggccccgtcagcggctgtcgttgttcgccagagttaacgttatcgaccgaaacgggattcgctgtcaaggatgggtcgatgggtacgctgagattgatattgccggtcgtcgtagtcggcgagacctcgttggagccaggctgatgatgaaggtggttcgaaggaggtagcaaggtcaaagactgtcgcactgtatgcgaccgctacaagatcgaacaatacgatgatgagcttcaccgatcgcaaggcatgcggagtaacgatcatattgccagctcacctcgtcaatttccattccggcaccatctatcctgtcattatcttctcggaggggactgccagactgaggatagctggttccgctgatctgtcgctgagcgactttgtccatcggatcgagagcttctgatcgaggcgtaggggtcggtggagtcaagcttggagtggtggagggttccgacatcgatgttcgtgtcggcttgtcgacggtaacgcctgtgcgagtacaagcggtcgttgacggcagaaaacggcctgacctctgactcccttgcgtgtatatggagttatcgatcgatcaacgatcactgatgaatcggccagtggaacgagaactacgtgacaggtagtatcgaagctgccaaaagtatagtcgtctgttccaaacgtgaccgggttctcctaatctttcctggaaagtagtatcgcgatgataattgctctcggtcgcgtttcctcgttttgtggcttttgctcgagccaggtcaagaagtgtgaaccgaatctcgagctggcgtgccgttgcgcgtccgtagatactcgccctgttcagtcaataaggtggcaggaattctcctggatatagagtgtaccagacgtggctatgtcacaggctattattgatttcgcatcaacgagagaagacgatcgaggttttgggtagaccaccatctcatgagattcgatggaccgtttagttttggattggcgaactgaaagtcgttgaactcccagccccctatcccgagtcctcctatcgaccctttcaacctgaccaccctgcaatcgccttatcacgacgcgtatcaccctctgagcaacatcacccaattcggcaagcagttggaaaagacgttccctggcttggtcaagcgtttcaccgtgggaaagagcgccgaggggagagacgtcgaaggtctcaggctgcacaagtttgtcaatacgacggaagaggatccagaggaatggtccccgaggaccttgatgggtcgaaacaagggtagggcggaagaagccaagactagggtgttctacctccaaggaggccaacacgctcgagaggtgagataccactgctatcaattcgatttcgatagacgatgtcgactgatccgtatcgctttactgcggctatagtggatcgctcccgcctcgctgctttactttgctcatcatctcctcgtccaagcctcccagaacaattcccccatcgtgcaccttttggagacgtacgagtttgtgatcgtgcccaccatcaatcccgatggttacgaatacgtaagtcggtcctatcgatccgtctgccagagatacgcgctcaattcgtcggtccaacgggatctcgcgatacagagtcgagagcattcgaggctatggaggaagaataggcaggatttggactttaggaactgcaagggtgagtttacccctgagtacgacgctgaatatctcagcttacggggatttggcctgcaggtatcgacatgaactcgaactgggtgagcatggggattgcgtccgcggcttgtggtagatactcacacccgcgtgcctccgctttacgctccgtagggctaccaatggtctcccaacatgttggctagcaacccttgctcggaagcttaccccggttcagccgcgtttgaagcggtcgagaccaagctcgtcgctgatttcctggaggagctgaaggagatccgggacgtccgggcgttcgtggacattcatagctacggccagttgtgtgagtcgatcgaaagggggcacgccttaccatggaaggagagctgaacggacgtattgccatcttcggacagtcatgttcccttatgcgtactcgtgttcggatttccctggtgatgccgagaccctgatggaagccggtctaggagtcgccaaggcgctcaggagcgtgcacggaaccgtctatcagtcgggccaggcatgcgatcttgtctagtaagtagaccgacgagtggatggcccgaatcgattagctgacaagggtcgcaatgttggcagtcgaatgtcgggagactcgatcgattatgcttatggttctgccaagatccgatggagttactctgtcgagctgcgggataccggtaccgtgagtcacccgctgggtttcgttgccatcctccgaattgggaacgaagagactgaagtaagggaaacgttgccgcagttcgggttcctgctccctcctcatttgatcagggagaccgctgccgaaatcacggaaggtctcgtctacctagccaagtttatcaacgccatcgaggggttcgagcagatctgaatagtcttaaaccaagcaccggtcgtgttgtatcaagatgaaaacagtcgatgatgatagatcttgaaattgagctttgccaattctgtcgaagttgatcagcctagcctgaccccttggcgatggttgacgatcagtcggtggatggatgacatcacggtcgtttgacccgagactcgacgcgcgtctgagcctcgccggtatccgatgatgggcagccagggtaagacgatgcatgagcaacagacgtatctcttgagtcactaccaaccccgttcattctgcactcgctcgtcaccggtcatcatattgtagcctacatgacccatagtacatgagcatactccagataatagggatcgccaagatacggtccgaaatgtaccccaatcgatatggatatgccggcggcgggcagatcggctacatgctcacgcagttcgacgtcctcagcacgctgtccacccaacaactccggtcaaggaataggcaggtcgatccagcgtaagtaaaagattctcttcaacctgctttccgatgtagagcctaattgcaccggatcctccttcatcctgctcggacagtttcgcgactgcggtgttcatccagtacatctccggtaaattggccaagggcaagacaaagtttgaaactagtcttaaagtggaggagctagaaagaggagtatgtatggcgcaaacggttgagcaggcatctcgaagtcaagttgaccggtctgccttgcttccgaacagctacctcaattcgtgcgatcgtttcacgaagcgagagagcgcaccggtcttcctccctcgcggatcttccctgctctgcgtcggaccgtcacgtcgggaccgaccgggccctctgcccgtctggcacgaacaagcacctcgacaggacaccctaatgtccagggggcgaacatctcggcgattaccgcccgtaattccacagtacagactgtccgaccgacacccgctactccggcacaagctggcgagggggaggatcttccgccaccaccgtattctaggacggaccctgagccagagatgaccgcagtcctcgagcgtcaactcagcaacgtcccaggatcgagcgttcctcggccccagacaggagaaggtggtagtcccaacaccgtttccgcctcaataccagaaagctcggatgccgaacagcgggaacttcagcaggctctggaagcgagtcgacaagccgacgctcaagccatggatacctcttcaccttcacataatactggcagcgccgcggaccaagagcaaagagagctggaacaagccatagccgaaagccaacgtcaggctgaagtcgacgagagacgaagacgggagagtcggacgtattccggtgatggtggcatgagcatgaacccgggtgatacaatccctggggcttatcacggtggtaacattggagacgcggtcgcgcttggtgcgacgttaccgatcaacggcaattcctcggtcgacgggttgtccggtcgaatgcaaacgatggacctgatggacgaggattccgggcagcgatcatctcagcacagaccgcttgaaccgttacgaacgggtaccaataatcccttcaatccagtcaacgagggcccgtcgtcgcccttttcagccggtccccgcgcctcgaacaacccgttcgagaaccctgcttacgaaaatgcagatggagccggatcgtctcgtacttcgtatgcgcctccttctcacccacctccaggatggcagaaccagactgcagcgaacccattcttgcaacctcagcgcgtgtcagatcaacctccgcccgtcgcacccaaaccacctagaccacaaagcaacgacatgggctcgagtatgcctcgcggcgggatcctgatgcatcaactcggtctgacccagtcgagacagggagacgatcccagtgctgagctgaagaaatacgacatggtgatcctcgttgatgattcgggctccatggcaggcgggcggtggagggacaccaggatggccttgatggaggtagccgaacaggctgccgagcatgacactgacgggatcgacgtgtactttatcaatgatccgacggcgggcgaaggcatcaaggcgagtttaccactcagcgaaagatgtcctacaagcgagaggctaagatctgtcgacttctgtttcatcagagtggccgggatgtggacagcttgttcgcgcaggtcaaacctggagggcaaacaccgtgagcgatagccattttatcagggaagaacctgacagtctgactgaattcccatgtggagcagtaccggccgggccctagaccggatcctgactaaatacatggacaccctcgacacatgcaccgatcttgagcgtcgcggccagctaccccctggtgaaggagtcaagccgataaacttggtaaatccacgtaccggctctcttgtttagcagaagttacggctgaccccgctcgaacgtgatcgcagatcgtcatcacggacggcgcccctaccgatgacccggcatcagttcttgtccgaatagctcgacgggtatgttacgcgtcccaggcagattttcatagaatcaagactgatctgtctcaaaaactagctggaccaaggccgctatccgctcagccaagtccggatcaagctgctacagatcggcaacgaagacggaggtgagcttgaccgcctcttcgggccgccgagacagcgagctgacgaccttcgctttccagctcgcgaggcactgcaacatcttgacgaggtcatttcgtcaaaacacggcgtcagagatatggtcgatatgttgcaaggcaatttgacggcctgagcgcagccaacctatcgtaatgattcacgaggatcatgccacgggtcttgatcagcctcgagtcagcttgtacttagatacccactctatatcatttataatcatggcacgtttgtaccctgttttgctgcaccttgtgggtttgccatggcttccacagctttccgctctgcggcctttctctgcttggacttggctatctccttcttggcgaccatgactcggtcgagcatctctggcgggaccttcatcgcggatcgccgtcgttcgcgctcgtagctctcctcgtagcggttcaattgctcgtgatgaatgtcgactgcccgactaggtcagattatatgcttgactatccgctctctctctctgtagggaaaagacttacgatatccaacttcttcaacgtcgaccccgccgacggctttgcctctgcccgattttgatctcgccggacgaccctctttcaaccccaagctgtcccaaaatttgaactcttcgcgcatgtcccggatgtactgcatatgcatgatttggttctccctgcgattctctctagccctgattcggttcctgatcatcatactcgtcttgacgggctggggcttcaggcgaggttgcgggacattgaacagggacggtcggaggatcgaacctgctaggcgaggaggtttgacagggtctccctgttccgccaggaacatgaatggtcagctttaccgatctgatcggctgcatcacatctagggctcactcgggcaggtgagactttggtaggaggtttcgtagatgcctggcggaacgatcggaaaagacaggaagacaatcccggttcgagtcgtaaaactagcatgatccctctcgcaaacgtttcaacaaattctgccaaaagcggacgaagattctgaaactgcaaggagtgcctgttcgatacgattgccaaggtgtgactgtacggtacgatcgttttgaaagctaggttacatgttcgcgtcttatactcctccaccccggcgtttatctcaagtcgggtaaggccttatgatgcgattttacgagacgaacagaccggttcggagtgtagctctcttgactgcagcatacaccgagcagccagtcgtcccttcgattttgccccggccagactaaagaacagcttgttgttccagaacgctctgtgcgacttgtagttggattcgaaattggctcgtagcggaaaccgcgtccagccgagtacaagaggaaagcgttgccgatcacgggctgacatgtcaatgaacggagacgcatcggcttggaaccgaaatgcatagtccaccgaaagccattttcttgtttgatacaagtcaagtgtggtttcgatgcgatgttatggggagtaaaggtaggtttaccatgcatgtaacaagcttaggttgatggccgaaagttccagcgcagcagagagcgcgcgtaacagcagcatcatctgccagagttcgttcagggtgatggtggtgatgtcagtcatcatcgtcatcgtcctttatctgactcgaaggcattcaaaacttgcaccaagtaacctacccatctagttctcggagtcgtctccacatcaagacctactagtgcccgccgaaaaccgcgatcatgccccctcgcaatctcccgacagacccggccaaactgaccccacctatcctccggtaccttgagtcctctcctcccgacggctactcggcgcatcaaaaggcacggacgaccgctgctcgtctcgtccactcgggtcacaagcacgaagctatccaggtgcttttcgtttcggccaaggagttgctaaaggtcaaagaatggggaagcgggacggatctggggtgttacttggtcgaggcttacaggaatgccgaagtcaaggtcgattcggagagcaagggtgagctactcagagacacattcgctatcagatggaacgctgaccttccgagtctcaccctcattagctcgtctcacccaactgctggctctgatgacgtctgaaggtacatggcgaaagaagctggcagacctaacaatcaagtgcgtacctgttgtgatggattcggtcgaactagatgttctgaaatacttcccaatgaatttgccaggtggtctctcgaattcggcgattgcctgacgggcgatcccgatttgcacaagtatatcggagaactgtattacaaaggttcgctgcgctacctcgttcccttctcgcataattccgcttcgcatcaacgtgctgatatcatttcccacatcgatacagacggtcaattcgtacaagccgagcaacacctggtagcatcatgcaaacgagacgccgctgtcatgttggcagaaatggcatacgaatggcaagtcctgatgacatctggaagatgacgaatcacacgggcctgatatcaaggaccggtcacacaggtgtggaaagggttccgaggatccagcaccctatgcttgtcgagtcgtgataccgtacgtcacatcagaaggcatgaatgccacgaatcctgtcgagctaaaacgggttgcctgtaacgcaacgcacacagcttcatttcgatcacacctcccgccatccttcccgcccgtgccttcctctccaaattcatcaccttgctatccagctcaaatacgtcttttatcacgacgaccttgatgtatggctctggagagatgccgttgaccacctcgtcaacccttaattggcttcagatggccgtcttgaccgtacaacgtgcaccagcagagggcgtctcgggtgtgcaggctagaggaacaacgggagggatttcgagagaatgggagagtttggtacgaaagtacaagggtcaggacaaagtcgtcggaagtcaggcggtacaagaggtaagtgcgatcatgcgtcgatgctgtatcggtggatctcgctgatcgcgttcgaccctctccatcacaggcattgttgcatatctcgaccaacactttcaagatcccgcctcctaggcaagctggaggcggccctgatttgatgaacttgatgggatccttgttcggcggcggcggaatgggcggtgctcccgctaggcgatagggaacgttgagcattcgtcccgatttttcagccgtcgcgttttttgtcctttcaatttcctagacgactgcagaagagattatcaccatgcatgtcatatattatgagctggtatcgatcaacctcgttctcgacggatcgatgatttgggtatagctaaatagataagacctatcacggtgttgtgaagaagcgcgtctcgggatcaagcgcgcttggttttcgatcgaatgagacccggagcaaggcaacttgtacgatttcgagactgctaacctagaatttcagacaacaatcggtacgttgtcccagaattatattctagcagccaagcatagctattgcatcctccagcatgctttctagacatatcacgcaacagacccgcaagctcgccctcgcggcgagctcaaggagctcgcttgctgtccccgctcggaccggtcagtgcatttcatcaaagcgatcatacggggcgaaattttatgaactgatcaatctcaatttttcgcaaactttagccatcgccgcacactgcgtgagccgcgtacggtccatggcacaagctgcgcttgcccaggacatcgaggacgatctcaaacccctgccttggtcggtaccggaaaagcctcaacagcccagcatgatcgagcccgagatcaagcaagcgaaagagatggccaacgatggtcccaactatactttcgaatctctcaagcgtcgagtggatcacgataccatcaaggctttgacactgcgaccgttcaggtttcagaacatgtccgaggtgcaatacagggtcttgtcgcagatgcccgagattgccgggatcatggagaggccgccccatggcatgtctactcgcgagtggctggagagtcttcccgaaggcagtgaggagaggaagatcttgcaagacaagatcgaaaatggcgtgcggaagaaggacatgttggtcaaggccaagaccggtaccggaaagaccatcgtgagtgatctacgcctaggtctccctttactcttcaatgagtatattgacatgctggatcgtgcatgcaggctttcttggtacctgccatcgagagaagaatacacagccttgacaaggagagcgacaaaagcaggaagaaccctggcgagaaggctgaccctagcgagaagggtctcatccttcgtgagtctgtacagtcccgatggaaatcttcgtacggtcactaagtcaggactcgatatcactatcaacaggcgagttgtctcgaagtaccgttggaaccctggtcatctcccctacccgagagctggccacccagatcgccaacgaatccatcaagtgcttgacttggcacaaattgtacaacactcagcttttggtcggtggagcgagtcgaaggcagcagatcaggctctggaggagggacaggaaggacgtggtcgttgccacgcctggtcgactcaaggacttgctacaagatcccgagatgggagagagctttgccgaggccctgagcaagactgggacggtatgtcacaaccattgcagagtctaatcacatttttaaatactgaccgttatccattcccggctacagcttgtcctggacgaagccgatactcttttggacatgggtttcaccaatgacctgaacttcatccttagccacctacccaaggaccgtcagactctcctgttctctgccacagtatctcccgctatcaagaagatcgcacgaagctctctggagaaggatcacctcttcatggattgtgtacctgaaaacgagtccaacgtgcacgagcacattccccagtaccacacggtgctcccttccgccgcggaccagatccctcacgtactgaggctgctagctcacgatcagctcaagaatcccaagggctccaagtcgatcgtgttcttgcccactctgaagctcactcagcttttcgccaccttcgtacgggaactgtccgaagctttgccctatggaaagaggacgagcgtctacgagattcactccaagctcgatcaagacaagcgatcgagagcatcggatcgattcaggaacgacactagccctgcatccgtcctggtgacttcggacgtttcggcccgaggtgtcgattaccccggtgtcacccgtgtcatccaggtcggaatccccggatctggcgagcagtacatccatcgtgtcggcaggaccggtcgaggtggaaaggagggtggaaggggcgacctcgttctcttgccgtgggagtcgcgattccttgaggacttgtccgaggtacccatccatccgcagcgacccgacaacttgcagcaggagctcgttgacctgtccgcagcttgggatgccaacctccctgaaatttccgctccgcccacgttcggcaaccgccctcgacaaagtcctggccgtgctcagccttatggagagcgattggagaggatccccgagtacatcactgaactgttgtccggtgtcgatagcgaagcgatctactcgactttcagctccatgttggggtactacatcggaaaacaggacgtcatcaaggtcagccaccagtcgattttgagcggcctgacgaactgggcagtacaggccggtggattggaacagcctccatcggtcagccagtctatgctggccaaactcggattcaagtccgaacgaccacgattcggcggtggtggtggtggacagcggggtagcaagttcggcggcggtggcaaccggggtggttctttcggaaaccgaggcggacgagagggtggcggcggtggctttggcgtacgacgcgttcacaccgtagcccgacctgggatggcgaagcgatttcttaccgtgtcggctgtacgaggaaatgccgacagttcgaagcaagctggcagtgaaggtgtagactcctccgacggaaactcgatggatctcttcgagactttgtccaacatgcagcctggtgccacctacagcgacaaaacctcggcaaaacttgtgttcgggccaactggcaaccagtacagcggaaggagtgtgatcgctcgggacggaaactttactatggcttaccgaaggttatctgggatcatgaaccgaaaccggatcaggaaggagcttcgattgggggaacaccacgagaaaggaagtgagcggaggaggcgtctcaagtcggagaggcacaggaggaggttcgctgacctcgtacgtaacaaagcgtaatcattaaccgagacgacatctgacacccattttgacatctacgcaggtccgtcaaaaagtacaactcgtacaggctttatacaaggcttgatctcgcatcaagtctgtcacgaccgattccatacagtatgagttgaccaatcaccattcttttacccaagttgcatcatgaggttgcgcgcacaagcgggccgttcagtcgttgtatatagagggctcgtgcaccgagacactgtataatcatacatgcctatatctgttccattgtctttctgaggggtcaaagccagattctgatcaccctgacatcttgcccttcccaagtgctagcgttccagaacatcggagtcacaggctgcgtcgtacgcctatcagaagggacgatgctgatcttcaaaccgatccgttctgttctcgaccaaccgctcgtatcagtcgagcctgagttacagataagtttcgcgagactcaccgcattcccgctcgaacaagtctgtcgttttctgattcctcactgtcgctgccaacagcgcgaacctggtgctagaacttgcagctctgccagtgctggacgggctggacgtggtttctgtcaagagcagcttcatcatggccactagcggtgctaccagatcgggatcatagatctacacgtaacccaaaaaggtcgggataggtgtatcagcttcacgatctccttgctgccaaggtatttatcgatttaccacgtccgccgcaagcaagatcagatcctcaggcaggctgtttgagaatgcacgaaccgcttcgtgtgcctcgctcgcagcgcgatcattgtcaggcggaagcgcgtcgaaccaatcgagcgatcttggtatcaccctcgaatctggatggaatcgagggcgatctgcccaaacgtatgcggggaatcagattaccggcatcacacagcttactgtggcgtatgtggtccactgacttgttttcaaattgctcttcaagctcctgagcggtcctcgcctcaacccttccgttctctcctgggttaccaccccatcctcaacctgtccgacatctgcctgctcgtcctcttcatcgttacagttatctccctcgtcccctatatctgtggcccagatcgtacgcccggctgtttgagccagatagcaggagagaaaacctgtcccggcgccgagttccagaaagtttgtccgatatactcgggatgacgaggagggctctggaggagggtgggggaatggcgggtcaagcaacgatggatcggtcgagagcaaggtggccaaatgaagactggttcgtacgggactgttctcgttcagccgctacccttccgatataggtgggctggcagacatgttctcgactgacctagctgtccaagttcgtaatccggtcgaacctgcttcgatcgttgtctgtgcttcgagcaatgtgattgccttttccgatagattcgggttgactgaaggttccacatccgctgtggaatctgaattaggggtgtcgtagacgtaggtcttgtaagatggtccggggctagagtgatgtcgattgtttaatcgtgagcatttctgagcgcaagccgctcagcagatggcgaactgacacgttgaaagggttggtcgactgagcgatcaaagctgtatagtgttccgctatccggtcatcgagttcctgtgctggatcgcaagagagaagattagccatgactttcccaggcattcgagctgagtagacttgccagctcctcctcgaccgcctcgtcgtcccgtagctcgtcttccaggacagctacgagcaacttccagaactttctctgatagtcattggcaggtggatagttcccagccaaagactcggcagacaagaggtgatcatagatccacgcctggtttctcgccaacgccagtcgaggttcaaggttgagctggatgatgtgaggtggatagagcgaaaagtactgccgacgcagtacctgtaattgcgccaagctggccatcccgggaagttttgatctcccgtttaagatgaagacggtcaaacgggctgtagtgtagtgcagacggggacaagtcaaggccatcgacaaaacaaattcaagatcaaagttgtcaaagaatagacctatgaatgctgctccggtttcatgttttcgtcttgtttccacccaaaatcacttgcttaaatccaccgtagacacatccctatatccacctgttcgtgatatcttcccctttacgtaaagcttgtttccaccttggaagtctctaatctcggcttcccggcatcccaacccatcacaaatcacagatgtgaatcactctcaacaggtatcttcaactacaacaacacttccgaaaaccaggcatcatcacctcgaacagacatctcatacttctagtcgcctgatcatgtcgtacggaccaggtactgaaaccatccggttccgtcgcccaacggctggacccaatgctgtcgcggagaagaagaaaaaggtccaagaggaggacgtccgggacgtggataggttcggtggaaagcacgcgcccgtacccgcctggaagaagaggcaccgtggtctgctccaagaccaggttggcaggtgagctaggaacatcaatatgtctgtttgctttggttctcagccgacgtcatctggttcacataggcaaaactcaggaccttttgtcccttcgttctcgctggctgtccgactattgctcctcgttcgagtctcggcggccatgtattcgaacatccaggactgcgacgaaggtgtgtcctctcccactgtctaggtaggatcagagagaattaagctgatacaccctcttatatccgttcgacaaacagtcttcaactttttcgaacccctacactatttcactttcaacaatggattccagacctgggagctatcgccagagcacgccatccgatcatggacctatattctgctacactggcctctggctcatttggcaccctttgcgctcaaaatccagaaggtcagtcccggtatctcgtcgcattacccttatttccgttattcgccttgtctgaagctcaagttgcggtttcttcccctcttctccgaaatcttagcgagcagcattcttcgtcttgaggatctctctcgggataatctgttcggtctgtgaagccagcttctaccgagccgttgcagaccacatcaacgagcgggtgggcaggtactgcctgatgatgctccttggaagctgtgggatgtggaacgccggtggctgtgagtccggtagatggactgctagcctacctgttctagcatgctcatcgctcgttctttaccccatgcatcacagcgttcttgccaacgacatttgcgatgtacacgaccatgttggccttcacttttgccattcccctcgcttcgaacaatccgttcggtatcactcgatcctggagagcgaccttcttcttctgccttgggcctattttgggatggccttttgtcggcctgatggcactgccattcacctttgagcagtgtttgttgagggcgggtgacatcgccaagaaggaagaaatgccgggtctgcttgcggagagggtcaggagattggtcgtcgctggtatctcctcggtcatcctcatctcggtatgttgtgctgttggtcactacctggtatagcaccaagcctgaccgacgaacaccgattttcacggcagattcctatcgtcgctatcgactcttgggcatacggacgtctcgtctttcccaacctgaacattgtgctttacaacgtcttctctcgttcgtcggcgaccggacccgagatttacggcaccgagcccgtcacgttttacctcgcgaacttgttcctcaactttaactacctcttgcctctggccttgctatctttgcccgccctggcaatcacttacaagttcgatttccgtcgacttggaacgtcccaacaagcggtcaaggccggagaatccagcccgtacacgctacttgtgttgcgtctggcgccattttacctctggcttggtaccatgagcttgcaagcgcacaaggaagagagattcatgtaccccctttaccccttgctctgcttgaacgcggcggtcaccatcttcctgatcaagggttgggccgagacgatctacatcaaggtgaccgcatcgccttacaatgtgagttacgagcagataattccggcaacgcagcaggactgacgggattgatgtgaaggctggacgatcgaggatctttagcaacatctctctcggactactcttgccgtccattttgctctcggcttcccgaatgtacgctctgggtcatttctaccactcgcctttcgacgtggcataccactttcagtacaccgagatccctcagctcctgattgagagcgggtacaagcccatcccgcctcccgaaaagcaccggaaacgtcacgccgaattgggctacagcgacgagtgggacttctccgtcttgcacgactttgaacccaagatcaagctctgttacggcaaagaatggtttagataccccggtagctacctgattcccgagggtatcgaggttggttgggttaagagcgaatttgacggcatgatgcctattcagtgggacaagagcttccctagcaaggacatgtggaggcgagagcaaaccagggtcgtacatcccggtagattcaacgatcggaacgaggaaaacccggatgcctacgtgagtgttctcgagcgaaaccaacgttgttgcgcgtcggctgacaatcgatcatactaggtcgacgtatcggaatgtacctacttgatcgactcttcgttgccatcgcagtccgcaaccgcgttgcagcccgattatgcgtccgactcggacaactggatcaagcttttctgcgagcctttcctcgacgcagcctcgacgccctggtgggcgaggatcttctatttgccgggaggcaaggcagacaatgcgagagtctggggcgagtactgcctgctgcgaaacaggaacgcctaggcgatttgagatactcagcacgctgaccgatgaggcggtattgacatcgagtctcatgaaaaagggaatcccataacaggactatcgtcatacaaattagaaaccagtcagactcatcacacagaaaaacaccttgtcgtaaaacaccataggtagaaatcgcgcgaacgcgatcagggcgaaatacctcgccaacattgcattgcattatagaatgagtcccgagagtatctccatcgttaataaagaagagccgaagtcataaagttggtgggaagagattgcggcgttgggcggaaaatgtttcctggtataggcctctttccccctggtaaagccgcgaggccagtgccctgcccagaatgtaggattaccctaaaggaatgtcggtgctctgccaagctccggtcttagtcgtcgtcattatcgggaccttgcagatgatagctcctgcgatcaccgacaggttgaatgcccacaccctccccgtgaagctctcgccgcatcaatgtgcttgcaggcgttctgacaggcggactttccgtctcaggtgagctgtcctcggtaagtggcctgttgcagaggatgcaaaaatgaatcagtctgtgcaagagaagtcccgcgtccatcaaaactcactgatctcccgctttccgcatagcctgtctgaaagccacagctagatcctcggcgtcactggggctgatcggtccagaggaagctatgctactggtttccgctcctgcaacgctgtgactagcgccactcggggcgtgcacggacgtgtgcgaaccgattgccgacgtgccggacttttgtcgattcaaggcgagtaacgacggtttcaacatcgggatcggcgatgctcgagattggcgagacgctggacgggcagtagcgacgctcgacgtctcttttgtatcgtcctggtttgtggcgaaagaagcgatgggtactgcgctggtctcatgccccgactgtcggggtagcggcactttctcgtccaatatacgatcttggacagtctcgtcgtgcttctgatctttgggcacaccatcgactgtggagacggatttgtccggtgcgtgacctgcttcttcacccttccaagccttgccttcgtgaactcggctatctcgtcttctgttgcgacgggccgcggccaagagaaaccaccatagggcgagcaaggagatgatcaggaacacgccgaggatgacaatgacggcgatggcctgtatctcaaggcgaacggcgaaggagtcaagttagcgtctaataatgatcgccacaacttcattgatgactgacccatttaggaaaggccgatcctccagaatttgcactctgcagggttccgtctggacctcttccgcctggagtcgtatccgtagcggttgcagctgcacttgcgctcgagctcgaccttgccgcaacgatcgaggccgatgatgcggacgccaccgaagccgacgagagtgaggcgagtacggtcgatggcaaggcggtctgaaccgctcgaaaggtgttttgatgcggttctccgccatccagcgtttcgccgccggggacgacgacaaaataaaagctgtacgtctcgcttccgcccggcgtcaactcggtcgcacgatcctgacccttccaccaatcttcctccggcctgatcgctatactcccttggccgttcgtgatcccgcgccaactcgtgacttcttccccagagtcagcctgatagagccaaacatccacatgcctctcaacgaaagtaggatagtttgcgttccagataaacttggaccaggtagattgggtgattgtggtattggcaagcgggaagcaggataagagagtattgccgacgttgtcacaggaagggtagttttcgaagacaggtccggaagatgctccctgtcgagggacgagcggatgatcggtatcctttggaggtcgtctgggtggacccgtctcttcttctaccctctgtctactcttatgcgatgacggctcgaatgaccgagggaatggctttggcgtaggttctggaccgagatcgtgctttgtggagacactcgctctgcctgttgcgacgggcaacgttgatgagggtgatggacggaaactcggtcgaaccatgtttgaggtcgggcctgtaggatatccgcttatcgtctagaacgcttgaaagtctcggagccctactatcatgttccaatcccgtttgctagagtggtcacttggtcaagcagtaatggttgatcgtgcgtcgttatcgaatatccctcggagctgaaggggatggattctcggtcaactccggtcgagggggacaaaggggagctctgaggggatgcggtgctgaaagtcgattatcggtcctgttattagctattcccgttcatctacctgtaggttcggactattggccatggtcgagacgtgatcgatacggttgatatgtcgaaacgaggaaaatgatgatttgatcagttgaagagagttttgatcgacctcgcgtgtcaagaccgagaccggagaccgagctaggctgatcgactttgaccatatattacattcaagtaaatatcctcctgaatggtcatcttatcgtacaacaaggacactcacctgcgtgattagctcgcaagtgtgacactctatcagaattaggttacacctgccggtccaaggttgaacgtcgtcctgccggaactgaatccgaacgcatcgaaatccactaaatcgacatgatgcagcatccccagatgatgcaacggccacccggccaaccgatggcaggacagcccatgatggtttgtgatgagcggctacatcgatggaatgaagctctgctaagatgtacatttgccctttctgcaggacccgcgacaacgattagcacagcaacagcaactcggagcacgacccccaccaccaccaccagccgcaccgcaaatgctcgtccctcaacccgaagctcatgctgctttgcggccacctcttccggccaatgcggagccgacgttcgatgatatacgtaacatgaagacgatcgatatggccatcgcaaggtaccgggcgaaacatgggcacatgaatgagatctttgacccaaggagcgtagccaggatcggtgagcatacggtctgccctgcttcttatcagactcaagaatctgatcgttgggctttgatcttatcagaagccagctcgaaatcgattgttaagcccgttgacctggcaactttagaggctcaagcagtaagcgatcaaagcttcttgggccagcactccgcacagaaccttacctgaaacgcaactctgtatttttcgcagaaacaactcgagcaagaaaatgcaagattagaggtgcagacaactcagcggctagatcgagcgaaagaacgctttgcggctatcgctcggggagaacaggtcagccctgagcaagaccaggacaggcaggcggatgtcaacatggcatgagagtcaagcaagccatcgacctataatagaggctcgggatagatgaaccatctcccgttgtacttgcaacctgtacatatgaaaatttcctcattcgactgtttcaccatcatccaagtcacgcccgagaaaccatccaaagagacttgcaacaatgctcgagagaccgttcaggcctgggtcaacgactttgcattcgcagaccttagtgatgtaccggtcgtcaaaagactttgcaaggacatggtgcatgcttcgctcggcacctctaagagaaaggtttcagctcatctactcaagatgtcatctacggttaagttatcgctcattccagcactttttaccggctgacactgctaccccgaggaattctttggcttccctgtgcgagtagcaatcttagagcataccccagcgataccgatacaacaaaatatcctagcgaccaggatattgagatcttccgccaaaattatgatatgcccggaatcaccgattaccttctgagttccgattaagctagcaacaaatccattgcttaggcaatttcgcaagcgcacatcactagtactgaactcggaatacctcacatcgccaaagatatactggactctcttagaacagccgcttccagagcgattcttacggcctctttctttcgatagactcaatcccgccaggatgatacacgaacttgccttgagacataccccttgtgaggtgcgtgcattgtgaaccagtcgtgttaccagccgataattaccaaggttgcgaagcggcagtggtaccgagggtatgagacgggcgtcgaagcgagcacacgtgcttgcccttgataagtattcataaggcaaatctatcatggcgtagtggaataaaacaaagcaatacactttatgatcaatgttacgcttcgtcaccaaacggtattgcctgtaaacgctgacgactacttgcgagcagcagtgaatgcgcaaattgcctcagtgccaacctctgttacgagatttcgcagtatccgccagatcttgccgtcgtcgtcgagatccaaggctacacgttagaatattatcatttcatcttggggatgcaaatcgtgctatctcaggaattggaaagtgtaaagccttggggtattgccttgtgtgcattagagtccgttcctgtagcatctctgatgatgccggccgagtccgtaaaattgattgcaaactttgttcgtttcatcgcctaggacgatcatctcgaccgagaggaggaggcgaacggcgtggggggcctcgatgcaggggcgggttcctaggaggcaagtcccccgggccgtttatcggaggtccgtacgcagagtccctggcgctaggagggggtggtccgtttcggggcgggtaatagccaacaggttcacgctctcgttctcgttcacgcggagggtagcctcgatcgcccgccaaaccccctcgagatccgctgccgtaagaaggctcgggagggccgcttggaaagctccttggcggaggcgcagcgacggccaccatcttctcggcttcacgacgacgttcgagttcagccattcggactttgagatccatcaattcagcgtctagcaccgacgatgcgggaggaggaggcggagcataaggtgcaacgtttcttgcgggagcagcataagtagggggcaatgcttgttccaaagggatcggacggccataactgcgaaagccctcgagcgataagtattcccacggcagatctgggcgagggtttcaaacataccggtcatactggggtggctgtcgttcataagctgatcgcgtgtacgtgtcgacaggcggtaaaggagcattagcagcggggtagtaccgttcgggaggcggtgccgatgggggaggagcacggtattcaggtgccctatctcgttccctatatgcatcattaggcggtccgctgggaccataacgatcgtaaccaggtcgagaggtaccgtatggttcaggcggtccgggtgggtttgcaccatacccgtacggcctggtagcaggcacgacagaagaaccaccgatgggcgcgtcgtaagctcttctaggaggactcgatcctcttgcgggaggcggaccgagagagtctctaggaactggaggtcgagagtaggtcacgttcgggttggaacgcggtgggtcgtcgtcacggtaaccgccggggggtttcgagtacctcgaaccgatcgaactcggcggtggggaggctctcgcttgttcagaatagggcggacgagaagaaggagggccggatccgcggatgtcgccgtagctggtcgagttctttggagggaaactacgaggatcgctcgttctgtgggatacagtgtagatgagagagaacgcggtgttctgtcgctgatcacttcgtcctgaaaacactgtccacttaccggtcaggcatgctactcgtcctagagaccccttgacgatcgtaaccggggttattgcccatcgatagacgctccctatggatgggaggctgtctatcaacgtaatcagtacgacgatcacctgcaggggaaggtcggtccccgtaaaggtcgggcctcgggataggcggtttcgagtatcgagtccctccgttcgaaatgttcgagatgggtgaagatggtcgacggatgggaggagccccactgatcctgtccctcaatgcaggcttgaagtctctgtccagagacgaaggtggaccagtagagacttgacgatcgttcgcatttctgtcgggccgtcgaaagtctcgggcgtcccgaggcggaccccctcgttcataatcagagtccctctgcgatcgagagacctgaagacgatcgcgttcgtagtctcgacgagacgaatcggtcgatagcctatcagtataagtagtagcagccgagcgattcgatacggaattcctgtccgaatggtaagaccgagctccgtgggtgtcggggcccaagtaacggtcgttgtaggtagaagttcgaggttgagagttttcagtgtacgtcctggaaccggaacgcgatcgaccgggcggagggggccgaagttcaccacgggacgctcgactatcggtaaaggaaggctttcggaacgacgtctcttcggatgtcctttctcgttcgacaggtgcacgattcaggccatttggcgcttgctcgtgtcgcgctcgttttggatcacgttcagggtcgtgttggtttcgcaagaagttggagttctgagatggaccggaccccgcctgaccggtggtgagcatgttctcggcatcccttttgatgcccgtcttcctgtcctgaccgctctcatgatcgtctccgtctgcgcgagcttcccgtccgtcctcctgctccctcttggtctcgaagctcttgagaaccacatccaccttgtcttcgttctcttcatcgtcggcgtcagatccgcctggaggagcccgtacggtaggatgctgtccgctgagaatctcatccttgagatccttgacgttctgcaagacttgagcggggactgggggatacctcgtagcttctgatcgcgattcagcatgttcctcttcctcttcctcgtcttcaacatcttcgggtcgttcgtgttcgacggtcatctggttgtctacgtgggcgtcgtcgcttggtgggacgatctcttgctgtgattgagaagcgggagtcgcaggccccggggaagcaaggccgacgggcgactggcttttggccttgatctgctcgccttcggttccagacatgtttcgagtcctccagtctcggtggaaacacaaggtttgtaatgtatggcagcgaaagcctctgtgtgaatttgaagcaagaagcgtgttgtcgagatgacggcctgatgattgagaaatctgcttgatccgccggactcgttagcaatcgccaagtcttcacatttcttctttagcttacctctcctatctcttaggattttgtatatgtccgagttagaacgccgtaataaagatgaaatgatcgttatttgatgagaataactatacgaacaagcgacaagaccaacacgatccagcggcatgtcgtcagaaggagagaggctagtcagcgcggaatcaaatcaacaaggcatctcgtaatcttacgtaagcagatgtcgaaagcgcttacgaaaggacagcggacatgataaacgtttccaatcaggggatcgatcgatatcgatgtccgctcgcgagtcaggcctggaccctccgctcacagtctaatagagtagtagtatagatgagatcacgagcatgcaagttacatttcctagtctggaccaaactttatcgccaatccacctcgtcctggtcatttctactacgagaaaaatgtcttctcctggtccttcataccgctcgacgtctggcacacccgtttccaaagatgcggaagatggctcatacaagcctgtcaacaaacacctactcactccgctcgagcgccaacgactccaggtaaactcctcgagcctcgtgtgtgccccgctgccgtactgatgaacactttctgtgtccatggagagcaggtcgaaagattgctgaaagaccctacgaaggaggtgcatatcccgcagggaccaagagagaaacagctcaggccgcccaaggagatgatcaagaacgtctcgggttccagtgcgggtgtaagccatagctcgagttctcattccttaccggccatctccatattcatttcacactccggaactttgcgaacgataggcggggagtggagagttccatgtgtacaagcagaaccgacggagagagtacgaacgactcaaattgatggacgagaaggccaaagctgtaagctcacaacgcaaacgcgcaatacaactatgcccacttcgctgaccccgaccaaaacaaaatctcgtcgttttcacgcattgtaggaagaggaagcgcttgcctttgaaactcgacaaaaacaacgagcagaagcagcggacgccaaaaccgccaaaaaccgtgctaaacgtatgaagcggaagggaggtggtaaagccggggctgggcaggcgggtgggacgatcgcgacaggcgcagcggacgtcaacggagatgggaagcggagaaaactggcttccggcggtatcacgttcaagcggccgggggaggaagcgagtgaggacgatgaagacgatgaggaagatgacgctcagacgggacgagcgatgggccatgacgagctgaaagacgagtcgggttcgcatccgagcggggccaaggtcgtggagacctctgccatcattatccgagacgacgattgatcggcggacggttcggaccaaagccgctcgatcaacaagatacatggttgtatatggttctgattttggtacaagatacatgctcattaccccatgtgtccccgagctcgccctcttcagctccttctttggctcgattacaatcgctatctcttggtctcgcagacatcgcactgctcgctggttgctttggatttgcaaccgcacaagctgcaggtccaatctccacccgaagcagaagcagttgccgtggggggattgaaactggcaccccagccagtgaatccgccggtaacagcgggtttggacacgggagcgtgtcccggtcggggatgctcacagatatcgcaagcagtgctggtgcccttggactgcaggaagcattcggtgcacgtccaagtatcgtttgccttgacggtcgaggccccgggattgctgccccaaccggtgaaaccagtgactcctgcagcgggtatggcatctttagagggaaccacatcaatagagctcgattgcgcggctcccgacgtggatgcagacgacccgtcaaatttaaaggactgcagctgggtaccagcgacacctttggctttgtgctgggcggcgaaagaggtgccggtcgctagactgggcacattggcgaggcatttgaagacgaagaccggaagagcacccacgtccgtgctcgatgctatatcctttgccgtccgcttgtcagtaaagctgctcgaggccgccgtatccttcgagacgttgacgggaggcggcgcctcctgagatggcaacgttgggaagacggccggggtaagcttgaccggcggggcaggactagctcctgcgttcgccatgataatatcaagagcatcattctttcgctgatgtggtatggccgaggtagacttagcgaaaccaaaggaagatgtcggttgatcggtcgcgtcggccgggggtccgaaagagaatgtagatctcgaaggtgcagccgtagtctgagacttcttgtgactttggaaggcggatccaccggacacttgctgtgaaatggtgctctcaacttgggatcggcttgttttcggcgccaccggttcgatcgtttgaatttcgggactcgagctgtccttgactctttgtcgctaacaatagaaaggggcccataaattcgcgtcgcgtccatcgcatatgtgaccttctgtagcctcaccttgccgctcgtgtccgccatgttttccttgataaggtcaagatcagtcatttccgtgtccttggtccgctccttctccttcttctctgcagcagctagcagagctcttcttccagccagtccgccagccctcttgtcagtcgcactgggtctcttccgtggcgaactcgccccaacgttgaagcgataatgttcgtaaggattcactacgggcgcaacaggctcagactgaaagtattgggatcatcagcatcgtggtttcgcgaactagcggctgcgatactcaccttgcgaccttcctcttcatcggcttgctttagcatgtcttcgaggtcttgtgcagcggcagtcttttgcacagtaggcttcgtcgctttaactgtagatgtgggggtagcgtggttcgcagtgatgttcggatttgtagctccaactaatgctgcgcgtccgaagattgatgattaccgataagtgagaagatgaacgatggaatcgtatggatctcggtgcacgaaccgttaagcctttgcctgccattagtctcaaccgtactgttgttcccttgactctgttcagcatccgcggcgggaaagtcaacggcgctaccagatgcctttggtaagctgaacatcgattgcgatttggacatgccactactcctctgggaagcgaagcgattgacagcagccggcctggccaaagaataccgcgaagccgaagtacgcagagaggagccaggcaaacccgaaggatatggcgatgtgggaagagcggggatgggagaggctgtcgattccggcatcccatcgtgttcgacgggctttgtaccgtaccgtcccggaggcgaaggttcctcgttgtcttcagctttccaggccttcctcaagggggtcgtaggtttactctgcaaggaacccgttccagataagcggatagccgtacacatcgagtacgcaggacttgcctcttctcggtgcatagacgagaaattcatggaggaactcttgcttagaccactttctttagcaaggactcggcttcgagcgagcctgctagaacttcttaaaggagtcgaagaggcagcgccccgcaagccattgatctgtttcttgacaggcgaatcggtatctgctcgacggatcaactcttcgatcgctcttctttcgtcccttgtgggttgttgatccagcgctttcttcgcgcggttgaaatcgttgatcaagtggatcgattgtaacggatctacaggttcaaaagaagcgagggcctcccgaataggcttgatcggagcatcagatacctgtcgtgaagatatcgaaaacgaaatcagcttcatgtttgacatcgtaactgacacaaagatccctgccaaagtccggctcaccctgtggccgtcttcttcttcgtccatctcgtcacggtgcttttcgctctctcgcttgacatcctggtagagctgctcttgaagttggctgccttgatcgagttcttctctgtctgttcgctctcttccccgattaattgtctttgtgctgaagggcgagaagagcatgtcggcgacggagcttaagaatcctcgctgtaagatcgagcattttatagatcagcacgatctcttaggcgacttgtcattgcggaacattgtcgttgacatacgttttggggtgcgggtgagccattcctgctgctagctgcactgttgccgatagaatccggacgatcgtatggcttcccttgcaatcggccggttcgagaacctcttgcaggcgtgcggtcggccatgcttctatagatccgagtgccgcgccggaattcacgatgttcgatcgtggaactgcttcctacctatcttctaaaaggccacagtcgtatcggctccgctgtgaggcgtagtttggcaccctgatacatcatggttgtggtcgatgttagaggttgacttcagtgccgtgcaccgagcggtaacgttgttctggttgacgcggacataaacaaatcattcacctccgtttctgcggaaatcgtcgagcaataggatcaaggatgtgtagatacaggaaagtgattcaagaacatgacatgtcctacatggtctcgtgaagggtcattatgagattgcctagcagtagcaaaaggcgttgcagaaggatgcagaagatatgtccaagatgcaaaaagctcggtcacatcgcttcgactgaataaagaaacgcaagggtaaatatattatcagcaaccaggtaaacatgtacactcatatcgtggcaatataatcggactcactttgattgatgaggtaggctttctcatcctgtaagccagtggaatgggacattagttacgtatttggattggctaaggtggctttgaatggctcggcctcacgttgaataattcatcctcccggtctttatggaactccctcaggtatacgagcaatttctctttgttcttgcgcaggatgttcgcgatcgctggtggcttattaggattggcaacaaaaacctgtcggacatatcacaaatcagcgagcgtcatttgggaccgctgaggccagtgctgtctacgcgccttgaaaacgtggaacgcctcgaactggatgttcttgctcttgtccctcagcgtattcataattatctggaggttctccgtactcgcgatataccgggtcatgatcccgtaatttgccctgtctaacagaatttctcctaggagcttaagagactgccgcttggtaacgtagtttggtgataaaatcatccctttgtatgcattgaagaactggaacgacgctcgacatcaatgcagataatctttcggttgctgtggaccacacaactcactcggtcgtaattctggtcgagatattgagcgaccatgggtttgtgccttgtcaaacattcctgcagacagtcaatcttagttgcctgataccgtgagaactgagtgtgcttgcacgcaccttcatgttcgcgaaggcgtcacagcttgtgccaaagcttgatttctcaatgtattccaaaaataagtagaatctgtagtgaaatccaaggtcgtcaatgtacagaagagatatagagacccccacgcgatacgcactcatccgagtataacaggatccgagccagattctcgtatcgcaagagctccttcaggatagtcccagtgttcaaggccacatcctcaatttcgtacctgtgggaggcgtgagcgtgcttgtttccccaaaaacgtttgtatgtcttgctcacccgcgtaacaccatgtatatcaactccttgttcctgccaacgtaatccacggtcgggctccgatgaccaatctgacgtcggagcagcaggttgaagatctgagaagcatccttctttgcctgcagcaggtaaaggacgattggatgatcagctagcggttcgtatgcatcgcgagagccatcaacaaccgacctcaaaatcgaatttaggcatgttgaggataagaagcttcaaaatgtcctgcgagtagacctcgttggcgagctgtgtgatcccaccgagagaatcttgatctaatgaacggaccgtcggtcagtaagcaaggcttttttttctcacacttttgcttcagaactcacctcctgcttcgccgttaagaatcgacttcatggcgaagaggctcttggatatctcttcgctcgcctgatgcatggagtgatgtgttctcgctcagctctccaacgggtgcaggtcatcgaggtctaggtcaacccacctttcgtacttccatgttgttgttcgccgcatatccggcctccagtttgatgctgttgtcccgcaacaccttcactagctcagccggcgacttgctacggctcttgttagagaagaaattcatctctgctcgggtctagccacttgatctttgcggtcacgtctccaaagctggtcgttctgctggttatattgatcgatcaattgctgattgttgacgatgtcgtgaggtcgtgattcgagtctcttatctagatggatggctacagtcgtggcaggcgggagacggacgtgaaagggtcgtaatatattgatgattctgatgaacagagatcgaggccgctcatagggacgagacttgacggggtcctgtcgatagagattgatgggagatggacgattgcaacctgggtctgttcgggctagtactctcggccctcgggggatttagcagggtgacgcgggaaccgtttcaggcacacaggtggcgagtccatcaatccccgttgatttattgaatagttctgcccaaaccattgatgctgaacatgaatctgatagtcttatagttgcgtgtaccatgtgaaatcagacatagtaatacagtcgaggtacgacagatatagccatgtttgatgagggattgatcaacccttcgtctagcctcaattctgatctgtcagcaggagttgctccttttgtttgcgcagcgtgcagtccgcctagtacccagggtacaagccccagatgtcagcgattggtccatccctgttagcacagcaagctatcagtcaggggttgagagcgtcatgatccggatcgaagtgactcaccagactaggcccttgctagtattgtcgggtcttgcgggccaagcattgactgagatccgagctcgttagtatatgagacattaaaagcggcagggtcggtcgaactcaccgaggccatcccaaagctcgacgttgccagcaacgacagcattaccacttggcccgctagacagaaatccggcgccggtagagttggcgtaccaagggtaactacgcgaagatagcgtgagtgcgagcgtgcacgtcagcggaacctgtacttaacttacactcgcgtggttaatgcaaactcgtcattggcgtaaatctcgatgacagaattgtcgacatagatactgagagacagtgtcttgctacgctgtccatcagtaggccaaatcctgagctttccgacctcggtcacagtgccgactggtaaagcaccgccctatcaggatccgatcagaaaagcatttcaggaggagaacaacgtacagtgtttcagaatggagctgttgtttcggttgacggtaagttcttctgaagcagggtcgtacatgatgtcctgcacaagcgaaacagtcagccaaagtgatgtatccagagagcgatgacgctcacagtgtattctgcatcagaagcgagaacgcgcatgccaaatgcctgtgtggtattgctgtcgaaggtaaaatcggccgacctatggttgttgcgatcagtcagcgagaatatcgcatattgaatgaagaggacgtgctctcacaatcgatagaaccggcccgttggttgagtctggaagggagtgtatccggttgtctcgatggaggtgttggcgaacttcttgacggtagatccctcacgataagcgtcgacggtctcttgcactactttctggcccatagtgtagaccgtgacgcttccatcagtctcgttctttacaccccatgagcctttctcgtaaagtccaggagcggaaggatcgacgtttcggatgtacttgaccgagaggtcacggaacaaagtaaaagcaccctgttcagagagatcatcagatatcgtgcaccgtggtcgagacactagaacttacctgccaacccattggctttgcaaccacgaggtcgtcatcgtcctatggggctcagtcagcctgtggtcagctcgcatcaagccgagtctcgagctgttatcacgaacctcgtaggtccatcccgccatgatgtgcctcgattggccgtctttctcgtagggtaccgagacaaaggcgtaggaagacccccaatcggcgactccactgttgcggttcgaatgaggtcaacgatgttgaccgaggccaggacatgggtaacttacgcaaagaggacgctcgccgtaaatccgccgacgtcgttaacggtgtagttgaccgccgcccaaagaggccagtgaagctgatgatcatctcggcctgtgtggaaatggcattcaacacttcgttctgattcttcggccccagcattcgatatcttacctcgttcagttcccatgccgatgaattcgacagcggtatcatccgagccattgtcgttggcataaccggtttcattgagacgggcgacaaacgcggtctcgaagttgatcccaaagtctggccaaggggacaaagctgagtaagatacgcttctcatgtgtcgattcctcatgcagaggactcacttccactccactctgaccaactttccctcaggcctgcgatttcaaagaaccggccggcaaaatcccactcgacaaaattgtcgttttgtttctgcttgtatagccacagatgagggccaatatcggtctgtccgccagataaagtgctgaaccattctccgtcctgcacggtcccgttattcgccgagttatcagccaacatcttactgagatatttgctgcggaaggcgtagggatcacggaaaccggctggaagacaaaaagaatagcagtccgtcaatagaatcctcggcggtgtcgacctccgacttactgagattctgttcgggccactcgtaaatgaccggattgcccccttgaccatagttcagcttgcgccatgacgcgccgttgtcctcggtgtaagctgaggcaaagcaccatgagcacgatggatccgaccttgctatttccgtgcacagcacatcaccttacccatgctttgggtctctacgccctcggtctcatttgccacagcgccgagcggaccaaaggtcaccgaggtgtagaagatcgtagggtacccgttgaaacccggattaatgattgatccgtcgaaaacggcccggatgtcgtagatcgcgctgggccacaaggtccggtaatcttcaaacccgtcgactagcagacagcgagagaacagagtcggcggagatatgcgggagacagtcgcaatgcagacctacagtcggtccagaaagtgaagtcgtcagaatgggcctgtggaaggcctgaggttagtcacgtggtagggaaggtggggaacccgatttgtggcatacagctccttgggacactgtgtcgtcacggaatcagagtcagttcaactgtgaacgtttcttctggatatatggcatgagccgctcactgttgccccctctgatgtgcatcccactcgactgatagcctgtataatcgaaaataactccgtcggaagcccgctttgcaacgacttctgatctggactcacctgcgtgaaatcgtccgtctgagcgcaagaacattcccatggggtctgcgagaagtccggatctaagtcaatttctggcgatccgatgaatcagtgagataaaccctaccgttcatccagccctcaggcgcgatgaatcgagcctttggcctccaagtcgtgaagagggtcgcgttcccacattgagcaagagtctcgctatccacatagctgttctggtcgggtacgataacacaggcggactcgttggtgctctgcctgatctgcaacccaggggatgatccaaaggatgcctgagcggaagatgctgctgcaagagtcgccagagccagggcgtatgactttgatgtggacatggttgtcgaacgtttgacgatctgcatggcggtctgcttgggccaggccgttctgagattttgtgccgggcagggctgtatatatgatgaatagggtcgaagagaaaagtgacgtcgatgccccaaattcgtctgtgccaagcaatgatctcgtagcaggtcaatctgggagacgtcttcatcgtcgagccttgccctcctattttgcgataaaaggctgggccggcctagctcgcacgagaccggcggcagtggtcgagtgacttctgacctcttccgaacgacatgacgaatcgggcgagagaaggaagaagatcggaaggattcatcttccttttggatcaaaaggttagccagtttgctcccgtcaacgccatggcttcggctgctaaccgatctttttgtttagcgcgaaaccggagtcacctgtcccgatggaccccagatacctcgaagaagtctgatccggggagtgcctcgttccaacgaagtcgaatggaacacaccttggaatgagggacaaaccatactagaatggggtatagggtgcaacaatctgctacaagaaatcatcgcccacgtcgttgctccacgctctacatgacgcccaagcaaaccgtagccctcaaactcttcaagtccctcttcttgaactcgctctcgtccatcgtctcgctcacccaaccgagtacaccatctgccaagcgttcgtcgagggaaggagccccgctcgcgtctacggacacggccaggtattcttgcgatcgcaaggaagaactcttccacccccagctttgcgagactgtgaacatgtccggaccggagctgaatctcgtcaacgcagtgcccatcgcgctcgcgcagctgactgcgaaccagacctgtacgacaaatgtcaaaattggattaaaatcagatcgacaatggcaccgggcccgcggctctgactaaccttggcggtctttctgggatcgcgatatggcgaagcgggcgagttcttcgaatgggagttttccctcgaccttctcggtcctggaacatcgtgcagttcatctgcatccatcgcttcgtcgtccgaccctaccccacctgcaggactgacgctcctctgtacggcggtcgatccgacaggtgtcacgctcatcgtcctgtacatggccaaggtgttttcagggttcctgaccatcgagtgcccgggaggcagggtcgagatggtcggcgaggaatcgctccacgtcaaggtagacgccactcgtccgcgttctccctttttcagcggtctcgacgctggtggaagcggttcgagcatagattgacggtgcaggtagatgccgagctggacgcccttgttctttcccttgatcgtttggacgtagatattgaagtagcttcctaacaaccgtgcgaattgaaacaatatcagtttgcgatgaagaacccgaaataaccccgttccaacttacctgcatgaaactgagttgtagagtatagcctctccttctcgccgagctgatcgaccccccaaaactcgaccgcgaatctgaaaggctcgtatcgactccacagtgcgtcatccttgagatcgtgcaagagggtgtctttgtacagattgtagatctcgccgccggtcttgcgagtagtaccgaatccgaaaaacttgtcgtctgaatgaggttcgcggagctgtagaccagtctcaagcgcggtcgtcttttctcctggagagattcctataccctgcggcccaaagtctggcaagggcgatgtcggggtaaagacgttccctcctgtgacggcgtctccgatgcgaagcgtcccatcgactgggactggccaatagtgtttctccatgggggaacagaacggtccggtccccgcccctcccagcgcgttgacggcgatctgtccggctcggttcggacttccaaatgcaggactctgccggcccgacatgatccgtggcgacgaagcacccagacgattcggtctgcgtggagacattgtcctcgtcatgttctcgatctcttctgtgatatctagcgtggtgcagacgaggcccgcgtctgtactcgagctcgtcgatttcggtttcagccgggaaggcacacccggcgctctgggatgtgtgaggttgaggcttcccatggtcccggcggtcgtcgaggtcgtgccatccgggcgataactcgtgactcgggtctgaacgtccgaggccgcccagagtgcagcttgcaaaacgggcaagggaacgtagggcaatcccgtcgtcgggttgatatcgctcgacatcgaggatagttcatcaaatgactgttagccccaaagttcgagaaaatcagcgacacaagtcgtttaaacccagcgagatccgcacggcagacgtaccatgtgactaaagtagattcccgtcctgaaaatctcattcaattcggcatcctcctcatcttcctcttcttgtaaaatctcttcctcttcttcaaacgagtcgtcacccaccgcctgatcctcttccttgacaccgagattcaacctttctaaaccgagatccccctgggcgtccttcctcccgttaagggtcatgtacaaggcttccccgcttccctgcctcttgagattcctcgtctccctggccttttgtctcccagcctgtcgtagcgcaatgacccgcttggcgaggttgtaccgctcgacctcgttgggaatgaacaatgcatcacacgagatgatcccccggatgatctcggcaggaagaccttgatgaccccagatcttgagcgaggggaggacgaccgttttccctctgggcaaggtcgattccgacccagggaatccttcaacggcgcccgagagggagatgaacttgttgtgcgagattttggggtatgcggtctgtgctacgcccggtcgagagccagccgggtggatagcctgggacgatctggacgtggggaaatccggttgccaactgatactcctcggacgtctccgctggctatcctctggcaagctgctactgagaccttttcccttgccggtcgatgtcgacgttgacgacccttcgagacctccaggtgatccagttcgcggatcggggattcgatcaaacgtcaccctcgtgcgagccttgttctcctcccccgtggccgtacccgttgaatgactgtttcgtctcctctcttccagctccaacacgccctcttcgacttccatgagatccactgcccatcgcgccaaccatgccatgcacgcctcgccgatcttgtccccgacgggcccgtagaagaatttgggcgtggtgaacccttcggcacggtcgtacgagccgacagaaccggggctgagtggatgtgctgatcggtcccgctgcgtagaggaatcaggaccaggtttgacggagcatttctgcgggtggtccgtctcctcttcagcgggttcctgcttgacgtcccgagtatcggacgagtcgctcgacatgctcaagtgtggtggtgtgaacccggattcccgcttgaggctcctcgacatgcctgtcctctccctttccaacggcaactttctcgctagaccttccaaccccctgatcccctgggtggtctccccctcatcacgctcgagatccaaccctgcgccttgacccagggcgaacccgaggtaagccccgacgctccacgggccgacgctcccgagaatcagtcctacgcattccttgatgagcgagttgaggccgaggtagatggccgtgctcagaagggagaggagcgtctgtggggtgagcaagtgttgatgatgcgtcgaatgggtcagaggagatgcgtctgtctgagaaggatgaggaggtgcggcggctccacccgtcgagcttgatgccggggggtcgtgtggaaattgaaggacaggcggattaggaaaggacggtgtgagagggtacttgggcgtgggtaaaaggaccgcatggagcgcgagcgtcggatgcaccgaatataggcgggatatacagattctacggacgttggggggttcgacatcacaagactctctatcaggaacagttactcctttacgttcgtgggagagactcactcgaatgccgttcgactaatgtttggatcatcgaataccaactcaaccctggtcacgccgacctcgcctccgcctcccttcgtacgtctcctcttgaccctcagactgccactactactcttgatcccgttcgaacctctcctcgtccccgaaggccaagctactgccgtctgtccatccgggtcgatcgtgaggacgtcctcctcctcttgttcgtcccgctcgtgttcctcttccagtcgatcggcttcgctgaaacctccacagaagagggaatggaagaacccggcctggacgaggacgactcgatggaggcggtaagatacgttccattggtggatgatgaggttgacatcggcacacgtcccggcgagcagcgagtggtatagatgttgcgcgagcgggtgagcaggcgggctcggggtcgagctggtcatcgtgggtggtgatcgtgttggtacaaggacggatagggaagagcgtctctggctgaggaaatggatgagatcttagtagtcgttatcgcatcgtgtggacgttcaaagtcggtccaagtggtagcccagatcaggtcgatgctgcgaaggcgactgcgtggttgattcagcgagcgaggtcgtccgaggtgatgctatgatgtgtgtgaggcgaggggccccgtgacgcgagtcctgatcgtggtccaagtgagacgtatgaagcgatggggactggctctatattgattttttccttgttgtctctagcgagctggtgatctgtcaaagaggatgttcgatgttcctcgtgtgtgtgtctatgagtctggtccggatgaccagatccgggaatcccggcatcgaccgatcgttcgttcgttcggcaacccatagacgccactaccaacaatcacaacaaacacggacatacagctaccagctaccagctacaaactacaagctacaagctagtaatgtatttatgatgtccgtgttcagtcgtaggctcgctgcccgagggcatcaaccaccataatgacctcccacatgcaacatcctgctattcgaaacatgcatgtcatgatggtatcaggatcacgaaacactcataccccgatagcctagcaaacaccgtcgccaccaccaccgcatcaacatgtcactacgaccactcaccaccaccctgctacgctccagcaatccgctcagaacagcaagtcgaatcgtcatcccatcgacatgctcgacatctggaccatgttcatatcgacagccccgtcaggtcgctgcattcagtaccacccacattcgattcgcttcgaaaggaacatcagatacgggtctatcttcggcatcatcggcatcaccggcttcgacatcaccggcatcgacttcatcatcgacgatgacggagacgacgagatcgaacccgctatccgagatgaccggctcctcctccgcttcggaacctaaacctctacctatcctgcctcgtccactcggtcagagggatccaccgacgacggcgcaaaagacgtggcaggagaagaaggaagagttgatggatcagacgaaacggatggagaaacgtagagccctgtgagtccgggtcgagcggtttccgtcttgtgcgggaaaaccccagacgtatgctcggtcgtccggctttgtcctcgaacggtatgaatataccccgaaatcgagtccggttcggatacgggtgcaatatgaggatcccgagctgagaccgtctcgtcgtcctgcaccagcgtgaaagaagccactcaggggtatttccacgattttcatcaaattcggcgagaaggcggacatggaggaaagacatggataggtccgcccgtcctcatccgtgaagatgtaagttccgggggtctacctctggtgtgtgcgatttctaaactgatcaccggatccgtaactccatccccatgtttcccccctctgggtctgtttgtacatgtccgacgtccgcggctggtagaaagcacgctactttcccaatatctccggctcgaccttgatctcgtcctcgacgacgcacacgaccgacctctttcgtgacaagatcagcgtcgtcgtcatcctctcggcgaggatctcggaggaacacgcgatgagctttttaggggacgtcttggaggattgggagggggacaagggggcacaaggctcagagggtggggcaggcgtgtttcagtatgttcaggtgagttcctttccacccagacccaaattcggagtgctcgggacgatcgtggaaaggggaaccggttggctgattgaccttccgaacccgccgcagatcaaccaccaaccgaacccgttgaaatccctcctcctacgactgttcgtctcgagcttgaaacggacgatgaaacccgaacgctggccagggtacatgatcgccggtggggaatggggcggggtgagtcttgccttggaggcgttcacgcctgccgtgagaacagaggcaaccccgagctcatcatcgtattgtatcgtatcgtgtcgtaccgcatctctcgtccgcatcgtctcggcgtacagttgaaagaacctctagggatcaccaacaagcacgtcgggtacatctacctcgtcgactcgcaagcaaagattcgatgggccgggtgcgggttcgccacgcccgaggagagggaggctttgaggcgcggggtggctgtcttgttgggtagagccaaggaggggaggtgaagcaccaagtctgtatggggtatgggagcgacgtttaggtagagcatggctctgttgcatagatatagatatagatgcgacttgcatccatccatggtgatgggtgtctcacgtggtctccctcgagtctcaggtcatcgtcgttgcctcggtcatgcgcggtcgcctagtcgcttgagcttcttttgatgaattggaatgatgatgaatatacgcatagactagtactatatcgtgaacacccacagctctgactgtgctaataaccacgacgaccgtcaacgaacgtcacctccttctcacgtagagaggacaagactcgctgaatcgctagccaccgggtcggtcgagctggacaggcgcagatcttaaagctctacttggcgatcagcgaggcaggacagcacattccagcgtccaagactaaaggaccaaaagttgggccgggtatgagcaacaacgggagagcctcgcggttacctgtaagtacagaatggattgctcagctgctcgtgacaggtcgagccggtgaattgaattttccgctcggacgtcgatagcgctcggcggtggaagccaccgtgacgaggttgctcatgacgacgagacagctcatgaccgccttgtcagattggtcgaacgagcgatgtagtgccgaagctgtgagttcccgacaattttctctacggtagcttgagaactcatcccttgaactctgccctgatggcaggtctcggacatctacgtcaagctggggaacgacttgagcagctttgaaaacgctttcaagggttacggtgtcgatttcacgcaagtctcagggtcgacggcgtgtgaggtttaggacgatttgttgaacaaacctttctttcaccttgacgtcgtgcaggaaatacaacgaacccgtctccgtgcccgaccaattacgccctctgttggaacattgcctctcgcaggatcagagtcccgacatattggacatctacgtggatgatatcagggcgatcattgcgagagtctgggaccagattagacacggtcagaacgtgatcaagcggcagcggagcgaggctgaagctcgagctcaagagcaacagttgcatcggcagcagcagtctctacagcaacagccaagtggcccgagccgatctctcggcactgatcaggttgcagggcctagtcggtcgatgtcggataggacgatcaagagcgtccagaccgtaggcgataccagccgaagttcggcatactctgtggagagcagcaattctcatagagtccagctcgttgaccccggcgcaggcgattggtcgagctcccgagcgacttccccgtccagcgcgcaggatgctcgacccatgggacctcgtcaggcaggctcggcagggttttcttcccgcgtcaatgcccgtgtaggtgcgcccttgccacccgccccgccagacgcctttcgacctcctcgaagatcgccctcgccgaccccttcgtaccggaatcccaacgagcctacccggttctctgacacgaggatcgtatcgggtcccgataggccaatcaaatcggccgcacgggatcgaccgaatagtccggctgatcctgtaccgacgccggtgacccctccgaggcggatcgccaacattccaccgagcatggcggatactccaccacatctcgcctcgagattctcattggactcggaaatcgacccgtctgagagctcgacgaggcgatcgttgcgtgaaagtagctcttctaccccaccgcctgctccaattcaggctacgccaccgcacattcccgagatggaccgcggtatgggcggtctggcgagtcctatcgagcacgtatcggtcggtagccagcagacgctcgagacccccgaagcgcttcccacgcccgccgcacttgccagcttgacagcgctccagaattcggaagctctcggacgaagagcttctcgtcggttctctcagtaccagatcaagcagatgctgccaaatcacaataaaggaccttccagtagttcactcaggcacccccgattggaatcgctaaacgagggtggcgggttcggaccgcagagacctgcgaggcgggtcgccccacctttaccacccattcctgatacgtacgctcagaacgtagggccgaacgggcactcgcggatcccggagacgattaccgagagcaggcgtagtagcgggacgattcctgaacgggatgacgtctcgattcccgaggtatcgatcaccgagagctccccggtgcaacctccccgtcgcgagcggccttcgtcgatgatcatcaatcaggatgctgatgacgaggacgccatcggctcggatcaggtggtgcaggaggagcaagatgtttccgttactacctcgatctcggaagaacaagctaccgattcggcagcgccattcaaggtgttcctgcaattcggacgagagacgaaacgggtcacccttgaccgcgagaccgtcacctcgatcgtcgacttgcagggcctcttcatgagcaagttcgactatgctccagaaggaatggagctgtttccggacgtatatatcaaggatccaatctctggcgtagcgtatcacctggaagacctcgaggatatcaagcgcgacgccttgttaagcttgaacctagatcgtaagtccagcagttgagaactccctgtcgtcgatctgttttgacgcccctgaaatctctgttcctgccagctctcgatcaagtgaaacagcactttgacaataccatcacctcgctctcgcacgagatcaaggatctcaaaaacagctttatgcacgcccgaagagcttctgccttaaagctcgatgtcccgttggttggtacagtatcgccgtccctgcgcgcctcggatcgaggtcgggacacgtcgcccgtgcccccggtcaggttgacggtgtctaccgagacgactcccatcctcgcgcccagacccctgccagacacagaggatgggcttgccaccaatgtgccggctagcttgggtcggatagatcttcagaatcaacagcacgacatacaggtcttgcgccgagacttgggcacgatgcgtcaagtctacctggactttgtcagccagaccaaagagacattccagacggtgcgggatcaaactttggcggtccgagaggtagcgctcacgaaactgagcgggtcgagatcgcttgtcgacgcggccaaggtgtcgctcgagaagcactcttccgagacggtccaggcggtggaggacatttccgacacggtcgattcgatcaaggaagacgtgctcaagcgtcaaatcttgccgcgaacaacacaaatgcaaagcatgcaggacgacttgaccaaggccaagaagcaagtcgaacagctgagaggtcagatcacgctggcggctccttcctggaaacagacatggaatcaagagctcaagaatgttgtcgaagagcaacacttgttacaacatcaggaaaagctcaccgcggatctcgaagatgatatcaagcaggcgtgcgagatctttgatacgctgcgcgagtacgtcaatcagcgccaagctggcgtcaggcctgcagctggaccgaggaaattgcgttcgcctctcatgcccgaaggtgacagccagccccgcgtttccgacctcttgctcgagatccgaaccaaagaatccgacccgaaccgacgtctggctgcgatcgaacagcaacaacggcagagggaaaaggagatggcagaaaagaatgacgagttcaccgacgagctttctggctttgtagccgggcgcaagctcaaaaagacgggtggaaccgaagaggccgagcggatcaggcagaggaagcaggaactaaatttcaagaggatgttttccaacgagactccacgagacggggcgagctctggggcctccacaccgactgtagccagtggtcatacatcgctcgccgaaaagggtcggggggaaaaggaggaacccaagggcgatatcgttagcactacagcaaatctcgctgagacaagcgggaaagacgcacttggggaagagtgatgcatagttgtggttcatttgcatataatatggatgaaaggtgacgagatgcggttttacgagctcacactggaccgatgaagattcaattcagaatcgaggcttatcagaaatcgcaacttcgaactcgacccaggccagcgtcaatgacgacctatgctcgcaattagcatagggcgatatgagtctagtcggttccctgatggctaacctgatcggtcctgattagccgagcgagatctcgggtttccatttttgcttcccgcgggccatcaaacttgattagagcgactttgccacgctcgccttgacagcggtgtatgtcgagcggacagccttgcaaggagtggtcttgatcattagacatgaaactatgctagctccgacgaggagatgatacaacaaaaatccccggacgatacaaaacgccaatgcactttactagctacacgaatgaccgaagatgaggccatcccttcgactacgacctatcgcggcctgcctgccagaacctctcggcctgttccttatccccgtagacacgctccaccctgtccatcaggtgaggcctatcctccaagacatcccggaacctgtcttcttgagcctgtcttgtcctttcacgggtcttcttgtacgtctctcggcgccgttgtcgcctgagctggatctcgcgttgttcgtgctcgatcacgtcgttgtacgctcgttcggcgtcgctggcttgtttccagcgtgagacgagaggaggatgggagaggatgagcgaggtcgcttggatgagaggagaatcggtaggaagagcgagtggaagcggactctccatcgtagggtccggtcggagttgcttggggatcgcctcgggatgctgtaacacggtctcgaggtgttccgtcgacaagagatcggtggggagagggatcacgtcggctgctggggccatatcatccctggcgatcgtttcgacgtcgtgattctcgttcttcctcggggccgacttgacacccgagaaccccgctttttcgagggcggccctttccgcctcgaccgtcatcccgcagacctcccaaacgtattcgttcttggtcatctctggctgtaccacttcgacaggtagcgagtacaccttggcctcccatatcttcctctcggctttttgcaaccggaaacctttcccaagaccgacttctggggtctgcgcgaggtttcgttggcgacgccgggtcatcttgacggccttggccagggcttcggccttgtccgtcggggtctcgagagggacacgagtcatgattttccggatgagactacgttcttctagtgcggtcaggatccggctcttgaagaatctgagaggaagcgttgagtttctcaggtaagcagctcgtccacccatacgaacggtgaacgcgggatcgcactcacttggcgctctggaatggatgatccggatagggagcctcgggtttcggtcgccagggtgccataccacctcgaacgttgtacgccctcctcatcttgatttccccacgcgcatccagtacgtgcagaggttgtggtgggagcgggttcaccaccgtctctgtcggccatccgacgagcccgagcgcatacaggtgtttagtccgtaatcgaccgcgagtcccgagaagggtgcgcacgatgtcgacgcccgtaggcatacccggtgcgatcttgctcgcggacatggtgggtgcgacgctgattctttgtaggagtgtaggagtgtagcattgcacagctgttgatgatgatcattgcagctttccatgtctgtctatgatggcggatcgaccgaaatcaactaaatctcataaaaggtggaaatagttgcacaagcaagaacatgggtggaaatatcaatgcgagcctcgatgccgttatcaaggtggaaatatcacatcactccctaccttatcggtggaaataacaaccccttagtcgccctgcttgctgtgttggctacctgcttgtggagcgaaaaccccacgaaagactctcgtcaaacaactcgataaagaccatcaagacacttaccaactccaaacaacgtctaggattcacataaaactggacagcagcactaatagtcatgactatcggtaagccttgaacatcacattcgctgcgcactgccacaataggcacgtcttgaacgcctcgcaattattcacgaaacagattactcgctctacggcggcgccgagagccccttccctccttcagactcgacgacagctccgcccttgcccactccggggttgacagcagatgaagactgttcttccggatcgagtgatacggacgacaccgggttggctaccccgaccgattcggaggccaagaagcaactcggggctgctctcggctcatctttgaaacaacgcaagggtgccgcttcttccagctcgaccttgcagatcgggaaacccgtgcctgcctcatcctcggaagacccgcaggactttttgtggatcatgaccgaggaacctcatcgatcccgccgcaaagccatcctcaaggcccaccccgaggttcgcaaactcatgggtcatacccgcgcgacggcacccctcgtcggtctcgtcctcgccatccaactcaccaccgcgctgtgtctccgtaatacccacccactctcgctcaagttcctcttcttcgcatacgcgatcggagggacctgcaaccagaatattttcctcgccatccacgagatcacgcacaacctcgccttcaaaaagatcttgcccaacaagctgttagccatggtggccaatctggccatcggggtgccctatgccatggcgttcaaggggtatcatatcgagcatcacaagtttttgggagaggatgggatcgacacggatttgcctagcaagtttgaagccatcgttttgaacaatgtggcaggcaagacctttttcgcgtgagttttcgaccgaggcttgcacagatggtgcatggatttcaacgtgctgaccctccatgtcgatcttggactgtacagtacgttccagatcctcttttacgcgcttcgacccggtttcatccgatctcagaagcctacctggtaccacctcctcaacgccgtattcatcctcgccgccgactttctcctcgtcaaatcggccggatgggcgcctctcctctacctattgttttcgtccttctttgccgggtcgctgcacccctgcgccgcgcactttatcgccgagcactatctcatgagcgaggtcgccagcgaggtcgaggcggtcgatccccagggtcacgagaccgaattggagcacgtccgagcgttgagccaggagacgacgtcttactacggctggctcaacattttgtgttacaacgtcgggtaccacaacgaacatcacgatttcccctcggtcccctggacccgattgccccagctcagggagatggccaaggagttttacgatcccctgcccgtacacaagagttggcccatcgtcacctggaaattcatcagcgatcctcgagtcgggatgtggagccgagcgaaacgacaggcaggcgaaaagggcgagaggatcgacgagtcggcttggaaagcttgtgagcgggccgtcgatgtcgatatcgatggctccaggaagagcacaaagtcctcctcgtcttcgggagatcccgtcgtcattctcaagaacggcgaggaggatgccgccatggacagattgatgagcgaggccgtcgagcggggttacgggtccgacgccgagtagatcgacgtcgggacgagcctcgtgtaacgaatttcccttctttttcgaacgatgccccatcagtgtgacgccatctgtaggtccggactgggtccggactgggtccgaccgttcaggctgttttcctgttctagatacccttagttgacaatacgtatgcatcatcatacgcccacattcgtttttctgagcatcccctgggcgacccatcacatgggagccagtgcaaagtttggaagtcgtcgtcgtcgtttcggtactctgtaccatctccaaacttaggactgaccaggcgttgtggtttcttgagtcggcggcgagatagggtgaggctcgtgtacctcgttccgtcacaagccgccaaccgatctcggcatccaagtttcgccacgccagcaggatgttacgcacagtcaaatcagcaaagatctggcgcttcttgtcgagacccgggtgtgctctgaacaggaccgggtcgacatcagagcgagtctgagcccaagcctagccgcaaaacatccgcagaatcgtactttcagaagttctccgggctggctcgaatccgtcgtatagctatattctaaccttgagcccacggtcactatccttgtttgaacgcgttgttcaagtagaagatccctgtcctctggaaaacatatgcctgcaatcgttccattggggccatccgagcaggatgccaagtgataagtaatacatgctctccggtgttacaacgaaagcccgatgctgcgatacccatccggatctttgaaaggtatatcctcaccctcgactatcgcagagactgtccgtcatcccctcccatacccgacgtatcgcctgccttgcctccactccggaaccaccagcccgcgagcaaccagagtacgatcagaccgacaacgatgtaagcgatcatccgcagttgcctcgctggtgattgttgggagaatgtccgggcttgttgtcgagtggtttgtaggaggttggaaccgagttgagtaaaggaagaagcctgggaaaggaaggagacacgataaagaggatcagtaagtgatgggtcagcggtccgggacagccctgagacatactgtgcggtcgagctatggatgagagttattcaacgtgagtattactttgcaactaccttccccgcaccttgccactgacctgctcgttttgccgctgactatccgagaggatatcgatcgtgacctagaggataggcgaggttccgtacagaggtcagtgggaatgcttgctgcttgacgctacagaccggtcgaccgacatgtcgcagagacttgatcttcccatgtagctgattcaattctgactcattctgtcgttccaatgtgctgtcttgaagtctatgcgagggggtccgcaacaaggggaattgtcaacaaggtcacttgaacatcggcttggcggggtatctttacctggacatgctggatgcttggctagatatgtaataggctgaactcggactgtgaggactgaaccggctgatatgctcgtatgtccaccctctgtttgaattaggcaggccggtcagagtagtagaacaaggtgttttaccgatttccgattgccatcccatgtatgacaccctcggtcgctgcaagctagtgaacctttgggtcggaaccaaatcgggacaatcaacctcggtcgaaacgtgaaagtcgtaatcttcgcctacagctcacatgatcaatttgaaccatgacatgaagttcagcgtctggacgggagcaaggcagcgctctaacagagcactgcggcatgttcttcaaatgacttgagagcatgcaaaacgatggcggctatcaaggtcgactgatcgagtaatgtgctttatatgggcctcgtgtcaacggtgcactgaggtcgagactcttaacacaatgacacgctggagacaaacatgatcaaacagtctaattccacacactcctcgtgatactctcaggtgatttgcacgagtactcattcatcatccaagacggtccctcaattcggctccattcatcttgacctcgagcaagtcggcccgctcctgataccccgtccgaacgttctctagtcgatttcgttccgcgacgaacttactcagtgccatttcgagctttctcagatcggcgagaagaagcaggttgtttactcgaccggcatcttgcggttgagcgagaccaatgtctgtgttccggttgacgatgctctgcaccggtgtaatcggcctagacacgttgacggccttgttcaatcctagcaagcccgagcctgtcgcctttcgaccgagatctgcgtatagtgattgcaccgatctgctagaaaggtgagacggcgttcgctggggtttcccgggtgacttcgagggggatgtgttggctgatggggcgtttaggctgacgaaggacggttcagtccgtagccctttcatgttcagaaacgaccctgtgacggactggctatccacagcaggcatcaccgtctccagcgactcgatgctagatcttctccgatttggagtggtcggaacttccagatagttggcagttgcaagagatgctgccccgtcactactgatccccttgattagatcgctgatcacccgtatctgctcgtccaaatcgtcttgtgcatcctgcagcaacatctcgaccttgcacttccgcttccagccgtcgacttccttctcgatcttcccgacgaccccgaataaacccccttgtccacagacggtcctcatctctgccttagtccttgtccattctgcccgtatcgagcgggcagaagaatcgtccgtcaacatcccccttttcgtcctactgagcagctccagatcagcctccgagctcgtccccatcccgccgttccccgtatcgaacatgtcgagaggctgaccgacgaaaggacttcgcaggctgtccctctttcgctccttcttgagaacggtcggcggatctccttgagcggacgaagatgcaagggggagggaagtcacgctcaggctctgcccgaatcgcgatcgacttcgtgtgggtgaggaagggatggagaggaaagagtcccatatgggtgctccttttgctgatggtcgaggacgagatgctggcacgtccgactctgaaggcatgagtggtggagcaggtctgctccagctggagggagggagcgggttggcggtggacggtcgtttccggggagacgatgcagtgttggctgctttaggctggattggcgagttcacgaacgtttgtgatcccgccggtgctgacagggagggccgaaccatcgaggatccaggaacagcctgaccgccaggcgataggaaagcatgatgccgcaggattttgtgtgtctcggcactatcgaatcatcaacaatgtcagtgagaggtaggcacagataagactcgcgtgtacccactcgatcatatcccacttccgagcgtcctcgtacgctgacaatctccaggctaatagctgttgattccatcgctctaggtcccgatctcgtaaagcgggatccgctcgacctgcattcgtctttacaccttggcttggctgcacagcagggaccggattcagtccaatctgtggtggtgacttgaactgatcggtattgcctgatcggcgtggttgaggaatgacatggtcgacaatcggggtcgagctgaacgcagcgaagagtggattgccaggtgtctcctcctttctcttcttgcgggatcgcgagaactgtatgcgagtatgtgaaggcgatgatgagagaagcggtcgatgagaacggggaggatgtccgactcacccaacggctgaagctacccatcgtccaatttcatgggatcatgaaccgcatgccgaagcgatctgtgcagaaaaggagactggtcatggtaagacgtgtctgacgagtcacaagtgatgcagctggccagctgatgatcccggtgacttctattgatgagttcgggcatatgcaaataaagtctccctttgagtactttgatggatgatgatgatgacgattgatcacgtttcacttctttgctcgaaaaagatactttgatgaatcagatagatcgatcaaacagattccttccctttgtcaagagagaccttagcgaatggtatccagtgagaatccaagggaagaatgatactcggataggaccccaatcggcaacctggaggggacagccatgttaacgagaattcttcgagacacgatgtcgtcgctggcggattgatctcagagacaagtgaatttggagctagggttgttttgttcattcgatatcgccagtcgaactgtacagcattattgcttgggactacctcgatctgttaatgacgctttcttggccagtgcgacgtgtcgtcatgtttagcttgaattatggtatcattactactaactaatttcagaggttagctagctagaggaagccagatccgcctcaagtatgtagtaggttgagtaggttgacgatgaccgagaggatatatattacacgtcataacggtcacgtggtgattaatttgataggacacccgcgattgaggccatactttctttcgagaacgcttcaacctctttgtcactcgaggtcgacgaggttcaacatgttatcgatgagacgtcgacttgtacctagacagcacctgccaagtacaaccatcaatcacctgacagactagacaaaatgcccgtagccgtagagtgagtaggaaagaccgtccgctccaaggggaaacgagagcctcccagaagccatcagagccgactagctgacgacctgcatcactattattttatgtttcgactcgcctctctcacagccaacccgcaagcaccaactgggctgacgacgatggtaccgaagaccgtgagccccatctcatccggatctgccgagcgagatgattaatgtcttcctctttgtctaccctgtcttcgatcgcaactctcaggcgtcgcccttcccgcccctagcgaggtctccaaccctgatggcaccatcaccaccaccgagtggcgatacaacgaagatggaaagaaggtcaagatcacccgaaagatcaagaggaggacgcaggtgagggaggtcagccatgcggtcgccgagaggaagcactggtccaagtgagtgtcagagggaggtggcgtagagcaggagagacaggacaaggggtggggactgatgtggtcgctgtgcatgttgcgcaggttcggtgcggagaagggcaagcctgctggacctgacagagccacgacgaccgttggtgaagacatgcagttcaaggtcagcgccggtaaccaaaaggtcagtctctccgctgtggacaagctctttctgcacctttaattgacgtccattgaatcgatccgtcgccaggccgaacccgaacaagacgagaacgccaaactcaaggcccagctcggagccaagaagatcgcctgtcgtatctgcaagggagaccatttcacctcgaagtgtcccatcaaggacaccctcgagggtgccggtatgggcgacctcttgggtggaaatgaacctcctttggacgacgctcctacccccgccgaggccatgtccaacgccgctggtggatcgaaatacgttcctccgtgagtacctttctcgagcgatggttcgtttcccccggctggaccaaaactcatccgacctccccacccatgtgcgctttgcagctcgatgcgatctggcgcttctcgacccgctggagagtccatgttcaaccgaaaccgagacgaccttcctaccctccgaatcacttcgctctcaaccgatgcagacgaggacgatctccgagacatgtttggcaggtacggaaggatcgcccgagccaacgtcgtcagggacagggagacgggagagagcaagggtttcgcgtttgtcagctttgagagcaaggcggacggagaaaaggcgctcaaggcgttggacggacgaggtcagttgcgggtggacgtgtggaaacgatgatgcgtgctaaattctcaatcttattcgttgacaggatacgacaaccttatcttgtccgtcagctggtcattgccccgagaaccccgtgcgcagtagagagcggacgtctagatcgttctgggggctcagggcgcggctcggatggatattcgctgggctgtctcgagatccgagggatcggcgtgttgggtttcgtgtaacaatatatgaatacatctcggccacgcagcgggttatgtgcgggtaacgacccaacggagtgttgagacccgttttgtcgctctgatcgagacgaccgatgtgtctttatggtcgagcccgcatgcggcctttatagaccctcggtcaggcgtcgaatatctgtctctttgttctgctagcatctggaaaacaagcccggtaaaacaagccgagctcggataatttacgatgggttgcgcccaaagagatggagcgggccgagactgcaagcaatagattgatcagctcaggcgctgggttcctttatcagattcgaggaaatttcgtaatagttattctaccccacacaccaattggaccctggcgcgaccatccctcaattgtcctctgggtggacgatcggatcggtcttttccttgcttgccttctcatcttgcgtccggcagagttgttcctcggtacatccatgctcttgtcgtcactgtaaacgcatcgagccgggtcttgggtcggctcgcctcttcctgaaaatggtcacgggcagcgcttcttctatagagcccatccttcaccctgactgtttttttacaaaaagaaacccgacgattgcgcccttctcgccaggatgttatcatgctctgatgattcgaatccttgactgtcgctcctagttgaactgcgaatgcacatttcactatcttatcgattttttgccaggcaaatgacaaaaagaaaacgcctctcgagtcctatgcgcatgagttaccgccgtcacatcgcccacttcaccgggagacaaggccaagaggtgtcttatcgtacggaatacgggactagctcgaatcatcgcaaccccgtctacttactcccgctgccctgtatcaacaccaagtggggtcgtttttctctcggaattaccgcctatgcgtttgacccgtttccaaagagggttcgtgcgcggacgacagcgggtattctcccgtagcgctgatcctatatctcagttgatgaatgcattgtaaataaaaaaggccgggagaaagtctgaagtcgggcgcgacagattgccaagatgctcgtccaggctttaagagtcggacactcaccatatcaacgatcttgatactatgctcaatacgctttgtaccaaacggcgtcgaaactcagggcataacgatagaaacagtcacaggggtttgacgaggggaccaaggtccagtcctcgacggcatcttttggctccacagtatgtgatgtgaggacttggtccggtttgctttcctgttcttacgacttgacatcttgattgcatgccctttcactatattacatcctctgaactcaaacctcgtcatcaccggttcatcatgccccaatttcacccctacttacgacctccgagcccacgaatagcaggcctctcggctcccccaccgctgccgcccccgccaacaatggacacctcaaaccctcttttacaagcgggtccacatgaattattctggaacagaatcttggaacctcgaatatgaccgccagcagaagaacgaaatgatttgagcggtggaggaagtgtttcgtcatgtcaagacatgaaaccctatcagcttagatggggtgggactttatttcagtccggggtcacacgatcccccgttcgtaagctcaaaagaaggggtagggggaggatcaggggggaatagcctgacctgcagtgtaaaatctctaaacctattcgacgctggaacgtcaccttcagggatccctggccgtgcgctttcgtcgccgatcgatcgacggtcggcctagggagcagacttgaacccggtccgcgctggatactccggtatgtatactgtcaaaggggaggacgataggcgggacggcatctggagtggcagggaaggccatgatcaagcggcaaacggatgtgtcgaggttgtacggaggttaaccgcgcgctcgctaaatggaagtcgaagctatcccggcggtgaattcgcgtctctgcatcgatatttgattcgatttgacgcttataccgtgggtgcctcttttgtgaacacggaaagagcttcctgggtcttggaaatgctacacatgctaaaaccaccgaaaggccaacggcaacatatccttgctcgggaacatcccatcgttgacgcatcggcgatggacgggtttgatcgcccgtccgcgtttgccccgaagcaaggcagacgctagggaggggaggggagctgtctcttatacacttctcgttagggatcgaggtgtatgaatcggccggtcgggggcgaatgtcgatgtctttgttttacggacattatcctatacagcgtcacgatcttttatccatattctcattgttaccatttacttcccgatccaagcggggaatcgacattaaaatcgctatcgctacgtaaaggacattggacacgacgttccccacacgacaaactggaaaaggatacacgggtagagaccccggatcaaatctgatcctccacattgcccatcaacagctgtaccgcctcggacgctcgctcgtccgccatcttccccacccgctgagtggacatgtgttgtgaactcttcggactgctcatctccgtcgcacagcttgtcgtacgcaagatccgaccagccggggtgacaagaggcgactcgtcgtaccccggggcatggaatcgagggcgcttgtaggctcggggagtgtcgtcctcgtcatcgatcgtgcagagcatcccatcgagatcacggtcaatctccatctctccctcccactgctctttgcgcccaacgctcgtggtcgcgccggcgctgcgaatcccggcgttctcgtgcccgtcggaatcgtcgtccgtatcgtcaggctcggcttcttgggacatttggtggaacgatttggacgccggagacgagtggaatcgtttacatccgtcctgggtcttgcgtggggtagacgtaaggatatcgttgaatgagatctcgacgtcgttggggggtacatcatcgagcgacgagccgagctgcaaagagtgagtgtggatcagcggcggcttgccaatcccgctcgtcgtgagaactcgcctcgtcaaattcttcttgcacggcggacagtcgagtcttgccagtcggaagcggtagagtcagtgacgaggccagcttgagatgcaccgacgtgacgtcagcttttttctcttttgatgaacaacgactagggagacgagacccacctcgtctacctccatgtcgaccacggcgatcgtcttggtcttgcgaaatgcatcttccaacaatctaggcccgaccgcctggccccgtttgaccgcagccatcgtcatcggcaccgacccatcctcgtcatcatcctcatcctcggtatcactgttcgagggactcttgaccgcccaggttgatcgagcgggacggtcctcagtcctcatcggttgggtccgcgtgggatcgtgcggttccgggtctttcgcccgtacggtcgcattcccaagcccgacctgagcttgctccctttccgccgagatcctccgtcgtttctcctcgacgagtccctttcgcctcgcattgttccaggtatgagccttgctagaacccgcgataccatccgcttccatcccgcctgccacgaccgatgacctcctctcctctgcctctttctcgtccgacaatcggcgtcgtttcgcctcgacgatgtccgtcctcctggtgttgttccacgaatgtgcttttgcgactggctggaccagcgcgatgggtatgagtcctaccggaaccatcggcttgacatctacgtccacggcgatatcctggctggacggtttcatggcgacgaaacctagccggttgctttgactgttacgtttacgttgagaggcggacgagcgttgcgagtgcgtcgagaattgagacgaagcaggagcgggagcggtaggaggttctgcagtcctaagagcgatcggggtttgatctaaatcctcatccgctatcgatgtctggccagggtctctcggagtagcagtcgtcgagctttccaccgctctcggtctgtgcacgatcgccgtaaagtaagtcgacctccctccctcgttggtacttccttgggctacagcgatcgggaccgattgtgctctcccatctcccttttcgtcctgctcagtcgtctgtgtcaagctcctactcatcaccatcccggctgacaacggcggatcacccagtacttccagaccctccgtagccgtcctcttgatccctctgatatcatgcctcttgtacccacccagagccgtcctcgccctgttcttcatcgccatcctcttgacatcctccatcttccaaaactgcatctcccgatcgttggcggggagtcgtttgtgatgtgcgatcagtctccaggcgttgatagtatcacgctcgatgttgttcccgatatgaacacggacgggcagatgtgtgcttatcctattgcggtcatcgcccgtatgatcgctgtaaagagagtcgtactcttgcagagatcgagcacttgcgtccatcaggtgtaggtacgacgtggtggtacttcgaacccgatttcgttctggtttcgggaaaatcaacgatcacctcttgcaacccgttgttagtccgcggaaatcccgtctagactcactctgcggactcgtaggctcgaatagctggtccgggatcgatacccatctctccctttccctcttgacgagccgcaacaagtcggcctcgtcgcatccgtctatcgcctgatccagccgcttggtgtcgttcagtggaataggtttgatgactcgtcggctccgaggttcgatggtggtacatgatgagatcgaagtcgcacgagaggttgttggagttcgggttgtcatgacgccagaatgacaaattgatgaacgttgtgcagtcaatgagtcctttggatggtgttgatattggcgggagatattcaatcgaccatctcaaattagctgggccatctctcgtcctgagacagatcgtatgagatggaacgggatggtgattatcgttattcagtttattcgatcagacgtttgtgtagttacatgcacgtgttgacatcatcatcctgggccgaggtggctcaagttgcgagcaagttaagttgattcaaactctactttaacctcgacttccctctcgcgacgcgtttccccgagcgatcgaccacttgaactactgtagctattcgactaacgagcaggccagcacatgtcaggcgaggtaaacgagtctgcgaggatatgccgagcgaatggctgtagacggctagcagatcagatggtcactttcaatgactttcgaagggtgaaggtgcgcatgctcgatatctcgtgtttgagctcgaaatgcgcgagacgaggtcggtattaagggtgatggttacaacaaacaggtcgaccggttacaccgaggtcaacagagagtcccaacgagaaagagagagagagagagaggaaggggcaaacgacgggagtggttgtttgtcgagatggaaacagtccgttcgtgcgatcaatcggctttgagtcgccggacaggtaaccaattgataggatgtctccggtagaccggccaaggtggtaccaccgcctgtcaaagtgtagagtcaggacggagaacaatcagcaatcgtggcacataggtagattcgacccccctcccacactgaccaggacgatcagaacgtatcccgcagcaaagacgatcaatccgaatttgatcgatccggcgataaagctgacgaggaaagcgatgatctgccatatcgtaccgaaacgaaaggtcaataaagtcaaccttctggtctctctaacatcctcagcaaggtctcctcgtcagcctgctcaccccaaagacgaccaaggagaggtaagctacatgttcgctggtcttctggccttcaaagtccttctcgacgaggagaaagggagcaagagtctattcatcagtgacagctcgaccgggaaagaacccccatactctgagctcactatccggccttcgagctgcttcttcacggcctccatatccagagtacagtcaaagcgtgcagaattttgagcgggcgatgagtcctagttagaaaggtcccacagattcgtgctcgagtatgttgatgtacttcagcttcactcgacctcagaagaagctctgcatttgaccgatcatcttctagaaaaagcttccgaaagaccggtcgtcggaagctaaacgctagactgcagctggctatgagcctaaccaccagagacataagaggatgtcggctttgcagcttgtacctctcattaccctccatgctgatcatctgccaagcctcgacgatacaaagagaccttaccattttataactgaagcaacatgacagacctttatcatccttccaggggcggtgagtttgggtgtgtcgaatttgtagggaacataggtgttgagacggaacgctgctttacaggtactcgaggaggagcagccgagttcaagtgggacaacgtcaagggggacaaggacaggtcagttaccggcaaaggttatttgccgaacatgtgggctgatgatgtcgtctactctcagggaaaactatctaggtgagccgtcatccgcccgtcaaagacgatctcacagcatccactgacgccactcttcctccacctcgcgtcttctcaggtcattcgatcaacgctcctacaggaagatggcaaaatcgtaaagacatccattggtacgcccgagaagtacagacggacgagggtgaaaaggaacgtcaacgcaaagccgagatcaagcgtcagaaggagctagaagagaacgctctgagtatcgctctagggtacggacccacgctcaaggaggacggcgaagaaggtacaggtgcgaatagtatcaaggtggaaaagacggaaaaggaaaaagagctcgacctattggaggctgaagaaaagaagaggaagaaagagtgcgttcgaagatccttcttcccattgtgctcgcaggcacgggcactgatcgctttgatgatacccttgaccacaggttgaaggctcaaaagaaagactttaagcggatagaaaaggaagtcaagaaggaattgaaacaggaagaaaaggcgaaacgtcgcgcagagagggatcctcgagatcatcgtcgttcgaggtcgagagagtctaggccgagggatcacgatcgatactacgatagggagagaaggggcgagagcagtcgagatcggtacagagactcggggagggataggagacgatcgaggagcaggagtccagcgggtaagcgggatgaccggtcattgggtcctgcagataggaccccgccgagggataccggtcgggtcgggcgtaggtgagtcgtcgcgtcgtctgtaacgctaggctcttctccgaaactgatcctttcttccttgtcaattggaaacagccggcctcctcgaagggatgagagagtcaaggtcgaagattatgactttgaggaggagcgggccaaggagaggaaacgatgggaaaagtaccacgatcgggagcgcggcatggggaccgaatggggtcggggaaagtgaatgtgacgatttcgaagcagtttctggcttgtagagcgttgtctttctcatactgcgatcgagagatgcgaccagcagacgccctgtacctgggattctgggaaatatcgttctccaacgttctatatttttgtcgagagcaaatctcggtgaattttgatggctctgtatatactgggtcgcaactctcgtagtcaccccaccaatatctgtggtcccgatctcgaggccgacatcgacctccagagcgatatgacacaatacttggatcccaaagacctattctaagcgcactaggtaaagtagatgcaagaaatactcttttgaacgtttcagattttgtcgagggtaaatttcggtcaattccagagcgctttatatactcgacggcgactcctgtagtcaccctgtcttgagcgcgtcgaacgcgtaatctagcgatctgcgacgtgaatttggatcgcaattcgcaagagcaaatcaactcgtcaaactgacctgactggatacgggattctacttatcgtaagcctccaattttgacgagcatagtcgctgatctatgaggttggatttgccttggaaatagagccctggcacatcgactgggcgagcaaacgacacatgacactgaagcctcgtgttaatgaggtcgatcgatagttgagaccaatcgacgttgcaagatgccggctacacctcttcgtcgaccggatctggccgggatgatggcagctacgcctcagcatcaacgcctcatggagcaaagcgcagtagaggatctcttgaaagccggaatggaaatccaaatcggcgaggacgagtcgcacgacaagatgctcgagcatatcgaccaatttcacgcgctcttcaagatgctcgtcagcgagtgcattgtcgggctcgtcgataacgccgggactatcaccagcgaggcgatgcttctgcaggtcattcctttgctggaagaactcgagaaaagagccgtgcagatccctcgccttctgaactctctgcccaaagagctggaagggccggacaatgctcggatgaagataccgctataccgctggctcattccgaggcttctgctcaccgctagcggtctcgcattccaacccaaagctcaggatactggacagcgtatattggagacggtaacgaacttcatcaagctgctcggctcatacatggaagagcagtaccgagtagagggagtcgtttttgccggcgagctgctgagaggtctgagcgagagttgcatcggtgagtaccgtgctcagacagcgaatgagaaattctcgtgtctgagtatgtatgcgtatttcagaactcgcatcggacgatctacgaactggcagcccgttcactatcaggaccagtactaagccggcaagctctagcttcatcgcaagccaatgtcagatggacgacaatatcgcgacatccgatcgacatcctctctttccgtttccgacgccaaaaccttcgaggagactgtgtctcttgaccagcttgacccacgtcgtcattcgatctttcgacgcgcccaaccctgctacgacggcatggagagacttctgtacggacacgctcttctggatcatgaccgcgagttcaaagttgtcagaaacccttcgatcgagatcgataacatgcgaaacctcggacgttacgggacaagctggagaagtcggctcgacagtcgccaagcagcagcttacggtgtttcaagacatgctctcaataatatcgcggcccaatgtcttcccttatcatattggcgaacgtgctgccttcatcttggccctcgcagtggaagaccggttacacctgggatcacctgacattgatatggagctggatgacggtatcaggagtgtgatcaaatccatcgacaaggctctatgcggattcttgaagatcataaagactcaacgagcgggtagagccggcgatagcacttggttgaaattgatggcgaccgtcgagacacatctgacggtccaggaagggacaagtgcgaatgtgagtcgccaagataaatgttggcgtacagtacatctgctgattcgcgcggctccaggatttgttcttgcaaagcatctccgcagtccttgatcctcccggtgcttcggtcatgcaattagcgtgcagcataccgaacgatcgacttgagaccattcaaacttatttggcaaatttgaccgatcggtcgtttccgaaagagatcgcgatcatcgacgaattgcgccgacgtcaagctttgatatccgggacacgaggccggggcactaaacgaaaagcggatggacggcaagaaactactgatgcgactcaaacgcgaggttctatcgacaagcgagtccatgcagcaggcgaccgtgagcgcgatcttggactgggaggctccacattgctggatgcattcgctttgatcgatctggcgaaccctggcgagacaaccagccaagacatacccgtcttcctccagaagatatggaacccactggtcgagacattccgttctgcatcaagtctcgatgatgatgagatgctgccagaggggctcgtcggcttggacgatcaagacgtagaggtaatgatcaaggatggatccgcattggaaaaacgggcaaacaccgtactgggcgccgttgcaggaccgtgagtggcaaatccgatcgaaagctgtatgatgattgacgactgatgccggggctgttagcggagcgactttattggaccagtctgcaacccgtcacgcttggtttcacgcactacctgccctcttttgtcacatcgcaggctgtcaagggtgcaacggaatcactgtgggaaaacctcttatgaccagcggtaccctttccttgccaaacctttcgcaagagtcattggtctcttggatgagatttgcacgatatctggagtacgaatccgcggagaccgttggaacgtcgcttaaagcgcttctgctggcgcttcgaaacttgttccggcacgctgcaggacgggcattatccgactttgagccgcggcgtaacagattgatgcaagacctcttgagcgcggcctacagaaacgcggatcggaggattcgcattctagcagcgtaagtagattcagcttgtgaatgagctccgttccagctgatctcaggcagcaaatccgcgtaggcaagcgaccgtggcgttgaccaaggcgttgggagcgaggggactcgttggatgctctcgactgggtgatttgctcaccggaatgcgggacaatctctttacaaatcagcctcttcccgtgcaagaaacgactttgtgcatggttgccgaacttgctaagtgagtgtctttcacagggctccccttgcgaatttctgctcatttcccaacggaaataggtgcaccgagtcctacctctttgtcgaactcgttagctatttattcgaggcgctcggacggccgaatatcgctttgaggggcttggcacatactcaggtaaggttcggctctctggacatagcagtgatatcgctaattatcgattacttcgtcatctagctggttcacgttgcccggagcatgggcaagaccccttacttgatgctctcgccagttttcggtcatctcagtccgctcctcgtttcgggaaagctggacctacttaacgaggcgacacaattcctaggtgtatctcgcatgtcgttcgtcgagacaacactacagtatacaatccctcacgcggtgctgaaccgtgacaagacgaccctggagaacatcgcgggcctcgtcaaccgaccgctcggactcttactcatcgagcatcctatgctgatgccgcatattctcaaggcgatctatatgcaaaagcagaatcggctcgttcccgagacatcagcgtggctcatggatgtgctacaagttctcaaacacagcgacgcgcccatagccataggcaacctgctagccactcacttgacaaatctcctcgtcgagatcatcgtagacctgggggatgacatcaagaagcctgacgcagagatagctctcaagcgtgtttatttgacgatgaatcctcacaactccggcgaatttgcaacgggatttgccaattggttgaagaccaacatgcttggtatcatcaccggtataagcgatacaatgcacgatgtgcgaggcagaaaatccgctaccgagaaggctaaaatcgttcgaagtcttggtagcctcatcaagcatgttggaatttcgatgtctggcttctcttcccaggtaagcatgcaagaacgaattgcaccgtccttgctgtgttgacataatgcgacccagataatggcaatactccagagtatgcttccggtttctgaattgcgcctcgacgtgttggaagtatggaacacattcgtcaccgtcctccggttcaacgatatcgggccacatatcgggacgactgctgcggcgttcgtcgcgtcctggaccgaaatgaacaaggaagaacaagctcgcgcggcaagcatcttggattacttgcttgtcgataatagcgaagagcttaaatctcactttcaagatgtcgtgtctctggactcgataccagagctaagcagggctgccaagcgggtcgcagaccttcgagcaaaatggaccttcaaagaaagaataacagcaatccttcgacgatgcaacagcgagaacgcggctctggcgaagcattccgtctatgaaatgagagaagtcttacttgcgaatcagatggaaatttcgtctctggcgcgcggagattccttcgatccgctgttgggactggtatatcgtaccttgctagaagtggcaggtagggacgccgaacatgcagatgacatcaggatcggcagcttcgaatgcatcggcatcattggtgctttggacccggatagattctcgctgccgtcacgggatcgcacattcatgatgctaacgaatttccgggacaaggaagaggtcaaagatttcgccttgcatctggtagagaaggtgttggtcggagctttccgcaccgcaaatgatgcgaaacagcagattcagctcgcatacgctattcagcagctctttcaattttgcgaattctcctctcgactacttcaccaatcaggctcggcttccattccgaccaaagtgcgacagcgttggcatgattttacacgaaacaagcagacgcttgaaactgtgtcgcctctcctagagggccgttaccgagtcgagaagatccctatcacgcattacgggtaccccatatacccgacgtctacgacatacagagaatggctgcggtcttggacaacagatttgatcagcgtagtactcgagcatgaggaaacagacacgccgtacgaggagcaccggcaagcactcgtctacgcccaggatatcttcggcagcttccgaggagtagtccgcaccggccaagacgtggctgtagcccactacctgctgccccatttggtcctgtatgtcatcaacatcggtaacgagaacgttcgcgcgaacatcgtcaaggaaataaacgctgttctccatgatcaagtaaacattgtcgggacactggactcggatcgacggacgcttagcgcgcaggcaagtgatgcgtcgcacctggagttgaccatagcaactgactcacgtttcatttgcaggcaattttcgacctactggatcatctgagtcgctggctgcaggaacagcgagtccgcttgcagcaagaacagcgtctgagttccaagaaggatggcacaaactctcggacagacaagacaaagctgctcattgtctctcaaatcaagaacgttgatggtattatagcagaaatcgatccggaactcacagctcaggcggccctacagagcaaagccttcgcgcggtcgctcaagagcttcgagcagcggatttctcatttaaagaaccaaaacaaaaggcaggacgccgatctgcaggcatactatgagtacctgcatcgcatatacgcagacctggatgaaccggacggtatggagggtgttaccgcgcgcgtgtttgcaccttcgctcgaacatcaaatcagggaacacgaaagtgtaggacggtggacatcggcacaaagctgctgggaagtcaaactccagcaatcgcccgatgatatttccctacatatcggtctgctgcgatgcctccgcagtctcggtcactacggtaagtttgccgcgaccacgatacgaaccgtcaacactgacacagtcttgttctctatagacactttgcggacacatatagcaggagtattgacgcggcatccggattgggagcgggagctcgccaactttcagatcgaggcggcctgggttgtgggcgactggtcgtctgttcgagatatcgcagacggcggagcttctgggtcggaagtcagcatggcacgagtccttctgggaatacatgaccgaaactacgggggtttaggagacatcatgcgccagacaaggcgagaattgggggcggctgtcacagcgagcagtcgccagtatgctcgagcgtaccccgctatcttacagctacacatgcttcatgaggttggaatggtctgcgacgccgggttggagatcgccaagacttacaacctgaagacctcgaaccagaacaaacatcagatggtccaacatcgtatcaatcagctcaggggcaatctagagaataggctggatatcaccctgccatctttcaggattcgagaatctgtcctatcaattcgcaggactgcctatgccgagagcccttcgaacaatgccttgatgaaagctgaagttggcgccgcgtggatcgccagcgcgaagattgctagaaaagcgggtcacgagcagactgcatacagcgccagcctgcaagcagagctcgcctcggccccgcacgtctttttacagcagactaaaattctcaaggccacgggtcaccctcttaaagcgctgaatgagctcgaaaatggcatcgcgagtatgagacgccaacaagtgctgggaagccgttctgtaccgatcagccttgatggccaggaaaccgaagcgaacgctcggcgtctcaacgtggatatcgcaaaggtgagcatcgtttaaacaatctacgcgttcgaactgtctactcaaactgtagctctctccataatccataggccatgattttaagcgcgagatggtctcatgagaccggccgatacgattccaacgcgatcatcacgcgatttacagaagccaagaatctcgcccccaagtaggtctttcgaggctaacgccatgtcagcatgtactgatcgatgcttcgtctaacagagaagaaagtccatactatcgcctggggcattattacgataatctcgaaggtgtcgctgatcggtaagccgattgctgatgtcttgctgcaaaagagaaacaaggctcgaggctcagtcgcaacaacctttgtcaggcttccgcctcaggcatataccgtggagaattactgcagagcactccggaacggcaccaagcatatttaccagatgttgccccgcatgttgactatctggctagacttgggtgagagggttgctgaggaagatggcaagaagcgtcgctctaggttagtttttttcttatttgcttctaagcgcaacggctaagctagctctaacaacagtaccgccaaccccgaatcggacgctttcaaggcgctgtccgtgatgaacaccgcagtcgaaaaggcccgcaaaggcataccccgctatcaggtcagtgaatatcggcaggagccgatggcagaatgttgacttaccgtacctgtgccttttgatagtggttgacagcttatcctcagattgtctcccggataggacatccccaacacgatgtcaaagaaatcttgctgaaaatcatgatcaacgtggtgaacgacttccctcatcaagctacctggcttatggtcggaatttatcattcgactggagtctccagcgagcgagccaagaggtgtcacggcgtgttctcacaggcaaaggtaatttggctttcatggcaggcagggtttcgtggctgacaacgcatcgatgaacaggctatgcatggtcccaacacgccggcggctagggtcatcgatgacgcggtaaccttttccaaaaacatgcttagactttcgaccgatccgggcgccgaagtcgcaaccggcaaagataaacggagcaaagccaactcgctgaacctcagtgttgcgtcacaattcccctggttgctgcaagccttccccacggccatgattgttccaactcaggatgcactcacctgcagcctgccatcgtcgtcggccaacatgaagtcgaacaatcccttccctcaaggctatactaccatcaccagtaagtatcttcccagcgactgtgaaagtcagtctaaccggaacttcaccctcctgttcaagaaattcgcgaccagatcgacgtcatgccgtcgttgcaaaggcccaaaaagataatcttcgtcggcgaaaacggaaaagaatatcccttccttgtcaagcctcacgacgatctgagaaaagacgcacgtctgatggacttcaactcgatgataaacaaactcctgaaaagccgaagcgagacacgaagacgaaacatgtgtaagtcgatacccttccattcatccacatttttacttatgcaaaggggatgtagatatccgcacttacgctgtcatgcctttgaacgaagagtgcggaatgctcgaatgggtgtccaacacggtgccactacgaaacatcctcatcaaaggatacgaacgtcgcgacgtcaagacctatgtaagaaacccctcactgcctcaccgcacagatccgcacaactaaatgtgcactgttctagtctaccgaaatctacgccctgctggacgctgctcgggcccaaggaacccaagaatccgcaaaggttttccgcgattcggtattgccccgatttcatccttgcgtctttcatgagtggttcttccagacttggcctgagccgacggcttggtttgcagcgaggctggcgtacgcccgtaccttggccgtaatgagtatggtgggattcgtgttagggtaagtgcgctggtctatcgaggcgatgtgatgtaaaggcgctcatgaccggtttgcgcgatgtacagattgggagatagacacggcgagaacatcctatttgattcgacgacgggagacacattgcatgtcgacttcaattgtctcttcgaaaaggttcatcagctcgctgtctgagaacgtggacagacattgacaagatttggattgttcctctattgccggcagggccgaactttcgacgtgtcggaaaaggtaccattcaggctcaccccaaacttggtggatgccctcggtgcaacgggagttgatggcgtgtttagacgtggttgcgaaatcaccatggaactgctgcgcgagaataaggatagcttgatcagcgtgctagaagcattcatccacgatccgttggttgaatggcaagaacagaagagacgagaggtaagatcgcgaacgaccgtagcccgcgatggaggcactctgtcagcctggtcactgaaacgctctctatcccgcaggaacgacggaaccgcaacaagatcgcggatgtgcgacactttgcggagaaagccatggggcccatccgagcaaaattgcagggcagaatggtcgatgaacggaacacggccgcgcctacaacaagtgtagtcaatcaaatggagatgcttataacggaagccgtcagctacgctaatttggtaagtcgacggcgatgcacatgtcttgcaaacggaagagtaaaggaacgaaagtagcttacgttgattgtcaaccacatgcagggtggcatgtatgtcggatgggctgcttggctttgattccccttgttcgataactttacgacacgcacgaacgaccacttacgagcaactgtatcggatactttttcgcattggtgtacaaatcagcatagcattcggtttgtctcactctcctttcaggtgtgcttcacgccctcagacccgacaatttcgtgcatactatcgatgaccgatgctagacccaaacgtcggattgtaccacaaggttaagagtcgagtcttgtaatcggtcgtttataccgtatcgtgctctcttgtcgcccaatgccgagaagaactcccggatcacaacgatatgtccgcatgcttccaatcgggatcagactttactcaaatcgacggactgactcctgtgataagctttgctggcctggacttgacatagccggatgttcaattggcagccggctttgaatgctagtgtctcatcttcagaagactcgagcttgaccggattatgccctctttcgtagtactatccctcatcctcgtctccaaaacttaagaggccctttttctccttctccttcttcttgtccttcttgctctgcttggcagacttgggaggttcgacggaatcggagaccagtttgcgtttgttattggcgaccgagacttttgccgaggttccaaaggtattggtcggcttgatgggcggctttgtatcgaccggtattgaagctaacgtgctaagctgggctcctctagcttccttcttgagatcattccagctttccccgtctttgtaaaagcaaatcgtgatgaagagtcagcaattgaaacataaccgtgatgaagactggagcgacccgcactgattgtacttaccggtactttgacccttgaccttttcccgctcctgcttgtactgctccgccgtcaagtgcttcccttcgttgacgacgacgatttgagggccatcatcgtccttcccacctccgaaccgcttatcccactcgtcctcctcctgatcgctggccttgtctttgcctttcgggctcctccgtctagctcgtccgaattcatccagatcacccccttcgtcatcgcttccttccgcccatggaccgtccctcggcctttcggggatggcatcccgaccctcccttactcggacgggagactcgctccttccatctctaggtctcgagctcgaacccgagccatcgacctgcttcttcaaagcttggagaaaggcaggtactcgagcattataggtcagaccgttccgaaactggttgttgttgggacctccgccgtttttaggcattgtgaatgtatgcaaggtcgattactcagttcggctacaacacaagagttgttgaggttgatggacgggtcgtagggtccacagtatctagttcggaaggagagagtagtttcttcccgagtaactttggaatggggtcgtggatacgaaacaggtcatggatcgcgtacacgaagccatcgcggtcgacttcgtcatgcatccgtatcatggcaacaatataatttcgcaaattacaaacaacgactccatcattctcgctcattcctggatcattccatcagcaccatcgtcgttatcgttttcttgcggcgcctctgcactgaaggttcccatgcactcccatttgccggcataggtcgctggagatatttgtgagaggtgagcgttctaatagggaccaataacaaatatcgatgggatgtttacctttatacaatcggaccttgccgtcttcacctgccacgctgaggattgagccggtggtgttccactgtaagcgacaaaagtcagctgctaatcgtggtcacctcgattcgagattcaagccggcctacctcgacccttccgatcgtcgcttctcccaaaccccattcgcccatgacagcagcgctccatgatgcaggcccaccagtccctgtgccatcagctggcttgaccttccacacccgcacggtcccgtcccgatgcccactcgcgatcaagtggtagctcctcccgcagctagcagcccatgatagcgacgtgatcgcttgcgcaccgagtgaattatgcttctgattaggttgttgcggatgagtggcgttgctcgaaggaggtgggaggatgagcaacgctgaaggttgtgctgaagacagcgaaacgatctgtaaaggcggcgttcagtcgtcattagaggatgttccgcttccaaagcccggccagagtgtgctcaccttgatgatcccgctgtgaccgctcgagacggcgaggacggacccccaccatttctccttgcaccaactgacggtccaaccgcctagcgcctcgttgcccttgcccgggttggctaacgctgcaccactgacagactgttggaacccgctcccacccgctactgaaccggacgtggtggaagacgcctgagaaggttgacctgggaggtagatgccggaagaatcgccatcggcagtagcattgctcgaggtggagatgagggacgggaccgagatggaatgggtgagctgccagtccgtcagagttggtgagatggaggtgtaaatcctcagtgtcgcatccgtagagatagatgcctgtatcggcgagacatgttaacgtccgaacaccacacggctcgcatatgaacaactcgccagtttcaacccgaacgcattaggcccgaattcgactcccctcacactccctcttgcctcgttcaataacgctctttccacccatcgtctttgtccaccggtattcccgcctaccccggatgaccctccggcagcgccgatttcctcccagatcctaacggtgcggtcataagaacacgaagccaagagagagccaaactctgggtgagaccaggtcagacggaggataggtgcatcgtgcgcctgggattccaatcgacagctgaacgtggtaagtacgccgacgattggggtcgaaaatggtaggtatgcacttgccttccattccgcttcaagttcccagccgttccctttggtgtcctttctccagaccttgaccttctgatctgccgaacccgtcgcaactaccagatcgtcgacaacatagatccgttagccttcagctcacccccagtcgatattgtttgttgtgaagctcactccgctctccataaaagtcgtaagcgacatctatgaaccaagcagaagatttgtatcagagtctgggtcgcgaatgacgtcttgtatgtgctaggttgaatccgtacggacctgttacaaggtcggcatgacccgtcggcagggctgttgtttgtagcatgactattgcccgagattcctatttgcaccctcgtggtcttgaaggaatccgattgaagacagatatcgtgatggctgtgcgagtagagtgcagttagtagtagttggaagttgatagctagctactgtaggtcgagcgggtcggtttccgcgtctcgtgcattcagcagcaacaggttgacaagttgggaagcttcatcgtagtatatccatccacctgttcacaagccatcaagcgatttaaatcgcctattactttgaaaggtgtctcagttcgccatagtgtaaactcttgggaggactcgcggccgatcatcagtgccccctggtcaacgactgaacccgatcgatcgaggaggaaacctatccagttcggcaaaaggtcagggcagctaccaagcttggattggccgtcgataacaatcatacagtctcgtatatgctgtgcagctgctagcgtcactcggcctatagtacgatacagatgaacatggagccagcggtcgaagatgtcggtagtagttcggcggggaagagaaagagagaggacgaggtgctgccgatcatggctcagaccagcgtcgcagctcctgcagcgtaagttaagtttggagatagagccgcctacgtgacttgactgaatttccgccgcttcgacggtcgcactacagcctctgggctcgaggtgggacgtcaaactttgccaagactgatccgcaaaactaccactctaaacgacgagccgaaactcgtcagaccgtacccgctgaagaagctcgtagaaaagtcgagctgctcctcctggaagaaggtcgaagagtcaggcgagccggcggagtaccttttacctctcaaggtggactaggcagtcggccggccagtcgggcggagagcgtcgttgggagtccagggggacatccgggggaatcagatgtcgccggattgagggagagtgatataggggagaggttgatacccgcgctagaagaacacatagaggagcaggaacagcaaatcaaggaggagcaggtgcgtagtcatgtcggataagtctcatttgcgttcttgttgctgatcttgaggatgacattgcgctaggtggattactcaaagacggttgtcattcaacccggctcacgatggctgcgagtcggtcggtctactgatcccacgtgcgctcgtcgccgtcgactgtatgatcttggtcagagcgctcacctcctgtctaatgattctgctcacatagaccgctggaaattcactcttgcatctatcgcaagacccccttgtccaaactcaaatcgacagtgtacggagggttatctccgataccgagtcggacaaagaacaagatcgtagatctgctcaacgaagatacggcaccggtagaacctcttgagaccacgaaggatgagtccaaggagatgaccgaggaggcgtcgcggtcgcaggtggcatatgacgaagaagctatccaggaagaggtcggtcgaggttgattgaaactcgcctacctcaagcagaaggttcatcattaaccggtcttgatctgcaggaacggctgaacggattgatcaaggatctgcgagacaacctgaaacaacggcaagtcgtcgtgacaaagcaggtagccggaagtcgagctgaagcgacacctttgtgaaatgtagcatgcaagctgccaaactcaagctgcctccaggaaaatatgagaattacgtcgccacgtgtaaccggtacaatggcagtacaaaaccggtgcaacacaaggcttatgatgacccttatgccgtcgattgggtggaagactggaaggcggagacattgtttccggacgaggtcagtggatttttattcattccaggctgatctaccagttcaccggtgcaaacctgtatctgcaggctcttcacgtgccagaagaagcaccctacgaatgtcgctggccatggacacgaagatcgctcaacacgaacgagtaccatggcacaggccctgaagtcatcctggccgacatccaggctatcctcgaaaacgctctcggcaagctaaatccgccaatcaaaaggggtaccttctatgtaagtcgcgcgtggcattgttccacgttttagacggtctcacgagattgactttggcgctctcttccagcaacactcgatcgcgcttgtgataccagatcactccgacaaacagtacatcgaggcgatgtcgaaagtgctattccaatacatgggtttccgtcaagtgggcatacttcaggtgagatgtactcggtccgtcagctcgttaacgttgctgaattgcgtatccacccttgaagcaagctgtctgcgcgacattcggagcaggtctatcgagtgcatgcatcgtcgacgtcggtgcccagcgatcgactgtgacttgcgtggatgatgggatgatgctcggcgagtctcgatacgtgctcaattacgggacagacgacgtcacgatgttctacgccgagttgttgaagcgcatctcactcccatacaaggagctggacatgtcccgaaggacagacagggagatgctggatgacctgaggatccgaacgtgtatcatgctggatgtgagtccgagagtcgcgtcaaaccggctcacacgggttgacccgacgtgaactttcagcaatatgtagcaagcaacgtctggaagtttaacagcaaaaaccacaagagaccctcgatcgagtacgaatgtcagacatttgatcagcctgtccttgcattttccgtgagtacagtggatttcgcggtttataactagaattatttctgaaaggcgttcgcgtcctgcagtgcttattcgatccaagggtcatggactggaaacgtaaagatcaggtcaaccgatatcctctgataggctacgtcgacgattacatgacggagatgcgggatgacgatgtggtcagtagctcccttgtgcaacacttaaagcggatcgctaatgtttcggcagtccagacgagatgtatgtcgagagcgaccgaacatcttctgcctccgcccccgccaccacccgaacctgtcttcgaggaagtgaccacgaccaacccagagactggcgaggtcaccacaacgcaagttgcgattccgcagcccatccttccacctcccgaaccaggcttcgacattgtacaggaagctgcaaaaatgccgctcgaggtggcggtcgcgtgttctctgctagcagccacgccggaacgtgttaataatctggctggatctatcttgatcttgggaggcggaggcgctgtcgagggtttcggtgaagcgcttcgttggcggtaagtatgcacgtgaacgtatactcctcgggagactcgctcactctggctctctttctcgattagtgtcctgtcacaattgcaacagagagcgcctgggcaatcgatcagccccgaaatcctgccaccgccgcgaggtctagatcctcggttggtcgcttggcgagggggcgtggtatggacgaggttggattcgatgcaggacgtttggatcaggcgggacgagtgggatgagctagggatgcggagctggaagatgaggatgatgtagatatagacgaaacaacaccacacaattgagcatatgagcatacgcatatgacaagtcttgtcccattaaagatcctttgatcgtgcgaccgagccatgccccgatttacttccgttcgatatttccgcccggagcgagccgacgtcgtttgagactcggacatatgttggtcgtcagccttagacatctgtgaggatgaaagctctcgtaaccccaacagcataagatcagcacagtacagtgcttcagatattaaagttcatttccttggcgctcatgaagccggatgtcccgctataccagcggcaaaactcgcggtcaccatcggccttgcttgcccctcttccagtgggcgaaaggacacctataagatcgccgtcggcgtcatccgtacagtctcgacaggactcttatttcggatcagtagtactcggagagcgggacggagaagatgcgagggtggatgagcgactcttgatggatgagccttcgagctttgaagctcctcgagatcggctcgatcatgctttacgacggagaggcctgaacagagtggccgatttcagggggaaggctaccgacttcatcaataacaatacaggcttactcttgattgctgcggctcaatgcttcttcgccaggtgagattggattctcggtatagacgaaagcctcaagctgacatcgtgagccgcgcagcatgaactcgagtgtgaagttgctacaagatccgaagcaaggtggtggactgccgacattacaactgattaccattcgtatggtaaggatatcgtcttgaacggcaaaattttcgacacatcttgctgatcgcttttgacttctgtagtcgatcacgtttctcggttgcatatcctacctattctactcgggcgacccaaatccgattctcggtccacccgaagtgcgcaggctactagctcttcggggcttcatcgggttcttcggattggttggaatgtaagcatgcttctttacgtttcgagcacgtgggactagctgagtgggctttataggtatcaatcgttgcaacatttgtcgctttctgaggccacaacgttgggattcttgggaccaatcggtactgggatcttgggttacctggttttgaaggagcctttcaccaggaaggaagctacggctggaggtaagtcccgccgcttcggcttgttacgaagtgcagtccttctcactgcttacgccctctctaccgtttagcgatctcgcttgtcggcgtcatcctcattgcccgcccgacttttcttttcggctcaccgcgacagctatcgaatggactccccgtgtcgcccgattggggcgacgacgtgtcgtctggatctcggacgagctggcacgacaaagtctatgatccggacacgggcgctctgatcaggaccgatactcctgcagagcgattgagcagcgtggcgtttgctctacttggagtatgtggagccagcggtgcctgtaagcatgaatgcgcggattatgctgacgatgtccccagtaagctgacgtgagatgtgatgggtgtcccccagacgttgctatccgagccatcggtcatcgggcaaagccgttccatagcatctcttatttcagcttctactgcgtggtcgtctcggtcgtgtgagtcccccgattggccgtgatattagccatgtcaagatgctaggctgacggcgtgttcacctcgactcgttgccagcgggatgatcgtgttgaggaccccgctcgttttccctcaaaccgtccttggctggtgcttgatcgccatcatcgggtgagtcccttcggctaccgccaacgaggccagacttgagctaacaagtttttccgtgcacgtcgcgcttcagtgtcttcgggctcggcgctcagatcttggtcacaatgggtcttcagcgggaaaaagctggtcgagggagtctcgccatgtacacacaggtcggttggggagaacgttcgcctgctgaaaaggagataaaacgctgatacctgttgtcgtcctgcgatccagctgctttttgctgcactggtagagaggtacttgtttcatacgcaaatgacgttcactagcgtcatcggcaccatcatcatcattggtgcagcgctttggatcgccgtgagcaccggaacggctcgccatacctgcatccaggactgctgaccgttcttgtaaatctcacggacagttctccaagcaagaaaaaaaactccccgtcagtgatgtcgaagcaaacgtcgaccgcgaccgggaaggtaggaatacgatggacgatggtcggctgacccccgccctggtcgaaggatcgaacgaggtgcccctctctcgatcaaagtacgccaatcgcaacgtctcgaacggagtctcaggccgaaataattcgttcaggagcgtaggagggaaggagaaggatgatcgagggttcttgagcgagggttatacgaggagcgaggatggtggtgcaagagcggagggatctacgcggaatcaaggaaggtgatctctcgctcgaagagggtatagcaacgtgcagtctcaattggagccatcttcaatttggatgtggtggagaatgataatcttgtatacatcgtcgattgtcgagagatggtaagatgtacgagatgatgcaggatagacatgacgtgcgcactcggcttacctcgatcgtgatcgtcatgttcccctcggacatcgggcttcggcatcgggcatgaccggcaaggagagttaatccggatgcttttctggcctgtgctcgacacgccctggtggtcttcggaagcaaatttgggcggattgatagggagtttcccctttgttgatgatcgtttgatggtttgacgagattctggatgggagtttgcttggaatactcacgagactagctagctagacagctggaacttgacatgtcttgagtaccaacagtcttagctcgtctaggatccacagacgaagcttaaagctagcagagcacggagtcctcagctcggtcaccacaagagcagcttcaattggaaggatatcaaagccgatgttggtcctcgtgatcaattgatggctgcaacttgccggaaattgatcaatttcatcacgaatcccgtgtgatctcggctcggcgacgacaaagatgtcggacgatgaatcacgggaatcacccgaacagagagggaacgacaggtcaaggacgggtcgacatcgtcttccaagatcatctccgtgagtttcgataggtttgatcgggtctggacatactcgcaactatatatctaagagctatacgatcttgtggctgacccggcgtcatccaattttacagtccgaactccctctccttctcgccttacagtagcatctccagcttgccaaagacaccaccaccaagaagcatcttacggaccacgaactccaacatggctacacccggctctgatgatgagctgagacggataggcgaatcaccaggtgcttttttgggtctcgagctaggcccgcgaaaccaggatgatgagggtgatgatcgtgctgcggggagccccatcatacccatctcctcaggtctgccgagcaggaggacttcctcgacgacctttggccatacccccagtccgggatcgggttcgaggtatcaaaggcctctgggagcgggatcactagggcaatctccatcgagcagatccggggtgagactgcccatcggggaagcctcgacccttcgctcgggcgagaccgttcgaccggacctgtccagctcggacctcctgaataaagataaccattcatatccttcccaatcagtctcttcttcccgactcgcctcgggatacaattcggtccaagctacacctcgaagcgcgaggtctaacctcggttccacgtaccgtcggatccctacccgaccagactcggcggggaagagtatccgtcgactcgacctccacagtcgatcgggtagtatcagtcagagtactcgaactgggaatgggtacggatacgcgggaaacgaggaggacgatgacgatcaagcttggaacgccacaatcggtccggacacccgtacggggagatacccgaagacggcggggttgttctcctcctcgtctgcctcgaacaaaaaagcactgagcaggagcggatcgatcatcagtaccactcaatctatcgcgcagttgagtaggtcaggtctagggccagggtatggatttggaataggaggtacgcctggaacggccgtaggtagggcgttcaggaggacgagaagcgctctcaggctggctctcagccgatcaggaagcacatacgattcggacgtccagggcgaggctcacgacgatgaggagggcgactcgcaggaagatgagcgggacgacgtcagcgatccgagaaacgtattcggagaacgcgcttcattaatggtgtcagtggattcgggcccggcgtctggagccagagaagagaaccctggatacgaagccaatggagttagggtgtggtatagcagctacgatagtatcgattggctgcacgatcaggtgagctgtgtccggaccctggcggaaaagcgacggaatcttgctaaatgccgcgggttatcagatcaaggactcggtgaggcattccaagatcgaagcgagagcaagaaggtcctggaggggaaagctctggcgggcgtgggacaggagcatgggatgggtcgtcgtgagcctcgtcggtcagtccgcatgtatacaaagatcggcgacaactgtgactgaccatagtgggcctgaactaggcatcaccgtggctctcgtggcgtacctcgtcattcgaatcgaagcgttcctctttgatctaaagagcggagtctgtacgacgagcttttggggcatgaagggggaaggcagttgccccgcaggcggatggaaagagtggggtgcgctcgatctgaggtggttgcagtgggccgagggtctttacggagttcatcacatacaggcagtgatttacttctcgatcgccgtgagtgcggtatctgaaaggcgcccttcttattccatgctaatcttccccgatatagatcacactagcggtattgtcttccgttctgacgatctaccttacggcatcaacgagattcgagtcgactcccgaaggaacgttcgccccgaaaccacaagcgcaacgagaccaaaaaacctcgatcatagctactccaaacgagaatacacccctgatccctggcggcacggcgcacaacaacctgctccgcatgaatacagaaccggtctctccgtccaggaagattctttattttgcgtcgggatctgggatcccggaagtcaagactatcctgtccgggttcgttatcagaggttatctgggcggcttgacccttttcgtgaagagctttgggttggctctcagcgtcgcgagtggaatgtccctgggtgagaagcgagcaaaggatcctttctctagcgagcacatccaagtagactgaccgggacgggacttgtatgaattgcaggcaaagaaggtccattcgtacacattgcatgctgtgtagccaacattatatccaggtctttcaccaaatacgagctgaacgaagccaaaaagagagagatcctgagcgcagcttgtggtgctagcgtagctgtgagtactttcgattgcagtgccgacaagcaaaatttacacagattggttggctaggtggcatttggcgcgccaatcggaggcacattgttcagctgggaggaatcgagcacgtattatcccgcgaaagtcatgtggcgaacgtgagtcgcacgcgcaagtatacaaatcctggatctgatggaacggattcgagagcagcttcttctgtgcatcggtagctgcgctcaccctgcgagcgctgaatccttacgggaacgggaaactggttttgctcgaaaccacgtatacgcgcgactaccacagcaattctatctacgttgtagcgctcatactcggtctcttgggggtgagtctcgatcttgccaccttgcgatgtactgagcgactgaggtaatcggctcagggcatatatggcggggtttggagtttgggcaacatcgcttggacgaagaatgtccgcgccaagacgtggatgaagagacgcccgatactagaagtcgctatggtaggtggacgccgaagagctgtgcgaaagatgttattgattgtctttgactccaggtaagcgcgatcaccacgatggtttctttcccgagcgcctggaatcggatgggtggtgttgaatgggtctctagtgtgaggacgattgacgaaggcatcaaggttctccttctgattccggttcgctcttccaaagttgttcgcggaatgtaccggtggcgaggcactttgctaccagcccggtcgctatttgattttgatgaaggaactgagctggggcttcttcgtgcgagcggcccttgcctgcatcacatttgggtgagttcgaaaccgatttttctcttgttgaaggtactgagcatctggacgaaacgcagcattaaactacctgctggcatctttgttccttccctggccgcaggcgcggcttttggccggattctcggcgtcagcttacaagcccttgtgcatcgattcccccagtggtctttcctgccaccggaaagccacatagcccctggagtatacgctctcataggtgccgctgcgacattggcaggcgttactcggacgacggtcagcttggcggtgatcgtggtcgagctcacgggtactctagactatgttgtccccgttgccattgccattctcgcggcgaaggtctcgtccgatgccatactatcagaggggatctacgacctcgtcatcaatttgaacgaatttccgtacttagattgcaagaaagatcatcacttcggctcgagaagtatacatgatgtcgtgagtcatgaaagcacccttgcatcatccacggcgaaaaccctgaccatgtcattatgatcaacaggtcgacacggatttcccgtacttgctcgttgaccagaagcatacagtaacatctctgaggtccgatctggcggatatcctgaagaagggacaccgagatggctgtttcccatgcttgaagtcgcaagtccacgactcgcggctgggactagtcggtgtactcgctgtgaacgagctgcagcatgcgttgggtaagggccgccgctgtcttcaagtggtagctccagctgtttacgcaattctctgtcatatagatgaactgcaagacgatccgaatgcgccttgtaatctgatgcccaacctggagcatttcactggagaggactccgcgcatagtctgctcaatagtatggatgaagaccctttcgatttgtccgtctttatcgatcaggtacgttgttgcgcatggatccatgtaaatcttattcccgcaatgctcacaaattactcgttgctggtaggcccccaccatcgtcctgatcaactcaccactggagcttgtcagccagatgttcaacaagttgggaaccaaagccatcatcgtggtcgatgctcatggcagttttgttggaactatcgtcaaaaaaggttggctgaagttcttgaagcagattgaagacaatgagcactagagaccgagacgtaagcccagcggccttcacgagatgaggggatcgcgaagtgtgcgagtatcggtgttttcggttgtaaccacaaaacaaaccattgagacgaacggaagatcgctgtttgcttttagcaggcaatacaagaccccttcctcggcaagacgatgataaaatcgctcccggtcgattcctgcctgtttcgacgtgcctgtttggacgagatttgcgctcgatgacgtgcatctgctctatcgtagacgcttacccttggaactgctttgaatcaatataatggaacttcactgacatggcccacgtcgttgctcactttcaagcgaaaggtgatccgacgatttcgtcattcgtcattaatggttgtcgtcaaagtaccattgaccccggtccataggtcattcacgccaggcgacccccgcaacgaagaaggacgatctagttagggggacaaggtgagagctgctctgcaacataacggcatcataaggcatgcatgcaatcctcacattcgatcctgctttgaggttccgggatcgctctatatctaggactacacggctgttactacgagtactatcgctaaacacagagacttatatacacttcatccgcgtacctggacagtcttgcatgctatgatcagaccaaggtcccgaggaaaccgttccagcgaaggtgtaacagtgagttctgaattgcctaaatcactaacaagagccaaacatccaccaagggtcctcggtttcaggcggaagagaggaagaccaaagtcatgaggtatctcacgttgtgcaaagggagaagatgaagaggaactagtgtcgaatatcacgtaagtctcctgcttgacaacttcggtgtgcttacgtggtcgcacaagcagcggcatgccgagaggcgcgccctcgacgacaaagcggaatcgaccggacttgacccactctcaacgatgaatctgggaggaatgttaccttttcacggtaagggccaccttcagcatcttctgtcgcattccctcgatcggatagtggctgccaaattctggaacctgaagcagagcctcatttcaagcgtagcgtagcgcttacgggctctgcgacttgattagcgcgaaaaaggaagcggacattgaaatcgagtagatgtccgttcactcagctgcagcccccctccctcgatcacctaaaaagctcaacagcggaaatcgaagacctctcattcttcaagtgaccctttcatcacggcccggcctgaatcatagacccttgtcgaccatcgtctcgaggcttgtccttgtcagtaagcggctgaatcgccaagatgttatctctgctatcagcgtggcgtgatcaagtccaggcaggacaacaagctttgtgcaaaaagaaaagaaaaacaagaaacgaccgacaacattcgagacagacaggattcccaccgctcgtacccattttgggtacaaattggtagctgggcgtcttcatagatttcgaaagatcgaaccggaaacccctctcgagccgatcccgtcacgtcgatggcttgactctttcgggagcgaggtcgtcgtcgtgacgagccggactcgggaggcaggatcatggagagaccgtcagacgtttggcccgttcaaaccctggttgtgcccgaccctggtaaaatctcactcgtggagataaacactggtcgggtcggtcgctctgatcaaacagataaaaagacgtgacgtataaaatgtatgctagagaaacccgaccatgcgatacaaatgctctgaacagaaagtcactgccaactcctgttcatatcgatcatagcacttcgacccatcctagacgaacgaaacgctccaccagctcatacttgatcagatgcatcgactcgggttccaacgatgctcgttccccactgtgtatagcagcgcgatcagtctcgctttacagagggtcgcaggcgcgaaaggacggggcactcactcggaaaggaccacttccccgcagtctttgaggacgtggatgagcaccgggatctccttgttcggttgacgtactgcgcatcacaacacgtgagctcaaacagtgatattatcatggacctggccggacttgcccatgctcgtgccgtcgtttccgacatcgtccatcctcctcaaccattcaggtagggaatggagtacagacgacgagaaatgttgatgcagcaggttcgtgtacctagatggtgcaaatgacatcagccttgcctcgacatcataacgctcgcaatgcgctcgacttactgtcgtgcgtggttcagctcgagctcagataaccgggactgtacctcgggatcaagggtaatgtgatgtgaatatcgctcaacctgcatgaaggaaaagatcgggcgatatcttcagcttgtgcagggtattgctcgggattttcagaaagactcaccttgtctagacgacaccggaggtaactcctgatgagatacttgactcgctcgacttcggtcgagacgagctggagcttgaagtgctcctcttccgacgtcttgggatctgaccgtaacaactccagcatcgagccctgatgcaagaagtggtgcagtgagtatctcgagacgatcgccctctatactgagaacggtttgaccgagacttacctgctgttcgaccttgtgaagtatcgtctcgagcagctctccctcccagagcatgatgtctctcgtacctcgctctcgcatccaagctctgatgagctgcttgacgtcattatcatcctcaaattgatacgcttcgaagtcttctagccccttccccaaacccccatcgggaccgctcagaccgagaccgttgatatccacatcatcgccgtcttcgtccagatctcctagatcatatcgcttgatccctgtagatgacccgtctagggtggtcaacgccgtcgagctactcctgttcgccctactcggcgtcatggtgctcctcaagcgatccacaaaagagctgcctgaaggagggctcgaggctcgggaggacgaggcatggttgggcagagagtcccgatcccggtctctacgagccgtaggccgggtcggcacgggaacgtcctcgtcgtcggaatcgaaaaaggaaggcatgccgaaggaatgaacgttgatgagcacagctcgaaacagagtgctcagaggtctgggcagaagtgtggaacggtcatgttcgtcccaagagacagcagtttatcgatgacccagattgttctggcgttcacttcgatctagctcgcatgtccccgctcgcgtggtcgggtcgacaacagcagcaggttgaaggggtcgtcgtaacgatcagtacaggtgtaatgactatataacactacactcgacttgactctaccgacccctgacatcgttttcagctaccgcatcttattcagtcgtataccgttcagttttgcgatctcggagaatatgaaggtcatcgctggcggtatcatcagcttggtctggacagctcttttgtcggcgtggaccgtccaggtgagcatcattccgacatcgaagcttcagagtaattactcgtgaccctaacaagtatcgccgatcgcttggctaggctttgcatttttatctcgaatcgaacgagcagaggtgcttcttggaggagctaccctcggagacggtcgtcgaaggtgaaatgaaccaccacaccgcatcaatgggcacgtcgcttattccctttcgctaccggtttcccttgaacaggccattataaagccttagaatgggtcgaggaatcgaagacatgggagcaaaaccaggagatgggaatccaggtcgttgtcgaggtcagtgccgagcctagcaagcggaatggaaggcctgactgacgttttgggcgtgttgctggttgaccatcggtaggaagtggaatctggcgaagtcgttgcgaatgtgcacggaaagcctgaaggcaaattcacttttacctctcacgagcctggtaagtccattcatgatccctcgatgatgcgcttggagcagagctgaatcgctggatttcgataggtgatcattcgatctgtttgcagtccaactcgtcctcgggctacttctcaagcacacatatcaaactctaccttgacatcgctgttggcaccactcgacgagatccttcgtgagcaactcgatccagaagcaataaccgtgtcgaactgactccatcgacccctcgtatatcggtaggcacgactctggccacatcgaaaccttggcatcgaaactccaagacctcaacgatcgcgtatcggctgtgcgaagggagcagcagtatcagagggagatcgagtctacctttagagacgcgagcgagagagtcaatggtcgtgcggtttggtggagcatatggcagctggtcgtcctggtcggcgtggctgtggccgagatgagatacctcaaggtgagtcgaattacaacctggcggtcgacatgatcaacactggctgagctcggcaatcaattccgccacatacgatagcattactttgcggacaagaagctacgatgatcgctttcacgctcgttgtaaagaaaatgagccgacgtcacggacgatatcatcttgcttcttcacgctacactggccagccgcacagggggatcactggaggtcgccgagatccccttcttctacatttttcgtttgttcttctggcctcggaacccagaaagacggccctgctgcagtgacctgttccaagagtcgacccgtcttcacgctccgcatcgcattcgaagggtactggtgcggctgggtgataccgtgacccaacttgatgatccactgtttcttcgggttaccgcgagagtcgtacgttgcgtccgtttgaaagatcgtaaatgaatgattcgtgaactggaagaccggcactattgattacggttcttaaagtttgcgtttcaccaaacctcaccttccgtccgttcctggcgagcagaatgataaaatcgttctgagccaaaagatgccatacagaagggtatcactgtacctacttgagcacgagcttgatgtatctcgattttttggtcttaggcaaacgaccgaagagcgcgtgcctcagcttgtcctcttcgaactttccgagcctataggtccaaattccttgtcagctggagctcccagtgcctgcaattatcgagatagatctcactcgtctgattcttccttgtcactatcgggactctgctcgcgatcgatgtttggcgatccgatgctgtactcgcagatgtcccacaggactaaggtaggtttgtgaaatggttgagcatgaccctagtcgtggtcctgaagccaggtgcgctacttacgggtaccacagcgggtcccgttcttgaacactgagaccaaaacagcgatatcagacagaaaaaccgcgggagcttaaaaaggctaacggtctacctctgccgtcgctgcctgtgacgaacattttcgattaagtttattgcagctttgggactaccttcatagctgggcccaccttcatgtaccgtatagctaataggatgcctggcaaaggattaacatcaataagggtgtgccccacggggttatggcacaccacctacactggggtctgtaccgcatagtgccaggtgccgggtttcagatcgatgaagcccttggggacggcccacgaaaaggtacctccatcgatttgtagcctcaggtcgaaatgatacgctttgggcgagatgtgatatcattcagcgttctcgctgtgcaacagaccccctgcagtcgaactcaccagtagcttgatgctcctggacgcagacaaagttccgcttagcaagcgctgggaaacgcttgacgaggacatcttcgaacccccatggctcggtcggcctcttgatctcgtgcggcagatctaacagaacctgaggcgtatggaaataaccttgtccggcgaccgttcgctcttgcgcgatgagctggtcgacggtgtgagagatggtattcaaggtgacgggggcagggaaaccggtcttacggcgacggccagtcctgaccggtcgatcgtgagggaacgtaaccgcagtgtgcatacttcgaggcagtagagccccccctgtaacatccccggccttgacaaaagtatcatccgtcatgaccgagtcctgggcaggctcgagccctgtttgatcatccttctggatattcgtttggaagggagcgtccgtgcctcctcgctcgggttctgctacttcccagggacatctaatgcctccccgcttcctcctcgccctggccgccttgtcagcgagacgcatggcgagcatcgttcatcatccgtctgcgtctgcgataatgttcgaattgcatgtatttggaccactggtgcagccggtatgatggccggtataggaagctacgatttgtctcgcagtcaaggttgaagctttgtaagtaccaattcgctatctgctagaggaagacatgaaagatgatgttctacccggagacgcccagaggttagagattgaaagtagtttagcgatgtcagctgtgcggaattcgtcatcggcctcctcggctcctggcttcaactgctcgtcaatctacctacatgatcaatccttcgaaaagttaacggtcgaattgccttcctgacggatagcaagacatcattggataatgcacatgtatcatactaatcaaagaactcgaccacaagaatctactcgattgtaggggggttaccgagccctaatagtatagaatggacagctctcgacagaggcttgccttctcttctgagatctaccggcagaaggaggatcgtaggcggaaactcccgaacggaacgaaccgtcaggctaaccgaggatgtccccttacaataaggcgtctgtatacaatttgaagagaaggaaagaggacccgtgtacgaataagaagaggttgatgaatatttcaggtcaatcttaatttgtagtcgggggtgcgcgttgccctaagctgatgattagtgtgttgttgacaataacgtgtgtaccaatgagaagcgcgccactaccatctcgtaagtaagcgcaagcgcaaatgcgggtacagcaaagggtttcatcgcattcatcaggtacaactagcaagattcgactgataatagatacttgtacacttcgagagacggatgacaagcgttcccatagaggtatgctagcgctttagatgtctactttgatcttgttgagcatcggaaccacactgtcccaatcctcaatcgcctgtagatccgtgcatcgaaagcgtcagccggacatctcttgcaccacgacatcgttttcggcactcacctttcggtaaaagtcgatatgaccatcagcatagctcccgagcatctccttcatctcttgctgcttggaaagctcgaaaatattgtgctccttgatgatctcgtcattgaactcggtcgtcgtctcgtgagcggtggtgacggcgtcttgaagctgttgtccgaccgaagaatcgaacatgtcagtcatgataccgggaatttcatcactgcaatcgaccgtcggctaagcttacctccttgatcttgccatccatcttcctgatcctctctctccgggtgtgaatatcgtccgtccctctgagcttgtcgacttgatccctgaggtaagttgtcaacccgacaggtgcactcgtatgtccgttgtttagtgcggccattcggtctcgctcagcaacgaccgccgagagatacgcagacaactcctcaaaatcgagctgtttctggtctcgagacttgatgaccgacttgtgagcttgcgagtaagcgaccagagcgtggatctgggtcaaaaacggatcaacagtgtcattgtcctgaataagacaacaaccggattagcctaaggcaccatggggctcttattatgcaccgccttaccagactcttgagaaggccggaaaagtcgagcatgcgctcggcgaagcgattgaggggttcagtaatcccggactcgaggtaacctaatccttggtaagaagcagccaagtcgacgtaatcttgtgcgagatctacgggagcaacgaagtgcatgagtctttattgacaatctgcgagatatgccatcgacaactcaccttcagttctcgctcgctctttggtgaccaaacgttcaacaccggccatcccgtcctcgaacttgtcgataccctccttcatctccaagaacctctcgtcgggctttctgactttggtaaacgcgttgacaagagaatcagacaggttatccagcagcgagggtggagtctcgggaagtggcatgttgatatgtcgatgcatctcgacggcctagatcagacatcggtaaagtttagctcgacagcgctttgtgccatgctgtgctgcatttacccattggccagaggtgacaaagtcctttacgagaggacatcgggatagaataggatgtctcgctatccggctcataaattgctgcagcctggaagccgacaggataccactgagtcagcctcgccgataccctcgaattcatgtcgaacgttccgctcactcgatgcgacggtgctcaatgaattcggaaccgaatcgatcacctttgatgtattcttttaggcacagggtaaggtgggtgaggtgggtgagcttccatgagaatgcagtcttttaagcaacaatcggctcacccaatcgatgcttgcccgccatgggcgggaccactgcagcagggaagagcttggtgaggtgattctgcagaaagacaaagtctgtgaaacgtcgtcggaccaggtaaggctggttggtcggttgcgaagggaagcttggcaggtttgtctaccaacggtaatctcgttcagctggcacgtcatgcaatcaagcacgatcggcgagattgctcacccttgtccgaacggcatagcttatatgaacctccttggttccctccatctccttgctcggttcactgacgtcaatcgtcatccatcgaccggcccatctaggcatagtaccttcaccctcccgttgagcaccctcgagggcgtatggcttggcttctgcctgaagaacggcattagggtcggcagaggtgatgccgtggagagttgaatgaggatgaacttcgggcgagtgcgacggcttgttgtcccaggtcaccgacgtaaactcttcgtccagagggtcagaaccgccagccattgttatatagcctatctgtatatctgttgtatgatgtgtcttgagaggtattggaactataacttgaccagtcaaggggaaacatgatgatcgccgtctgattgacatgcatggcccttcggacttggtcgtcgtcacgcaacgataagcttccgcgcgatcgaaagccggaaccaaatatcgaagggtcgatcacggctcgaggaaatgcgtgctaagtccggtattatagagcggtcgttcgccgagatacaaagtgatcttgacactatcctgaaggaactctctctgatcactgtgccataggtcggaatacctgtcgcagagtggtcattatcagcatcacaaagtcaatgtcccttggagcgcaacccgactcacccggacgaggccactctgtagatcttcgagacgataactctcggtcgtaatgtgctgttcgtttgtttatcaacccggtcagcgttcaaatagaatcattacctaaagtctgctggttgtacttacacccctctcaacctgccacaccttgaccttgttcttcttctgctcggtctcggcgcagatcgcaaacatcggctcttcgaccgaaccgacctgttggttgtacgggaccaggcccttcttccccttgagcttagcatcgtgcagtacgacgacgtctccgtttcgcacgtcatcatatcgcttgtgctgggtggacccctcctgctcccagatcaaggtaccgaaaccgacgttcgcgtcgatgcctgcgtcgcccaacgcggcccagacaaaggctcgagaggaaccgtcctgaagattatcaccgacgtctttagtatttggtccggtcctgtttagggagctgcgctaaccgggacttacccctatcgattgtctcctacccgaatcggcaagcttctgtgccgctttgtacaccttggcgccaaaggtcgacgaagcttgttgcaattcgttgtaggcgggacgaccagcctgcatcgaggttctcctcggcgttgtgggcgagactggcactccaccggtagacgaccgggaaccgatcgaaatgcgagacgcgcgagagtcggatcgctggtgagcaggcgcgatgacgatgtcggccggacgagggggtggaggtggacccatggcatcgtcgtcctcttccctctcttgcggcgacaagatctccggttccgcggacatgtgagtcgtcgagatgggaataggcggagccagtccacccgccggtgcgctttgcattagacccgagtccgcaagacttcttctgctctgagcacggattggcgacgcaggtgtttcagcgatgggtgattggggcggcgacgtcaattgtgtgggtcttcttggaggcggaggcgggacgtcctcgccctcggaatcttctcgtccaggctcctccgcggtattctcttgcaatactgcctgtgctgcttccttctgagcttcttgctcgtgctctggttcaaggttacgctcatcgacgtccactgtctcgctgggtcccccataggcggtctctaccgtcggcgattgaggctctacgttgcggctgaacatgttgaagccgcctaggtgtccacctgcttgcaaacgagccagagttgctcttctgcgaacggctgcagcctcctcggactcgtcattgtcatccaccgtctgatcagatgtcgcgggcggcgcaaccgacccaataggactcaatggggcctcggtcaccggcgatcggggagcttctgtgggactcgtgggaccagtatcggaagtcgctgagccctgacgagggttgaagccgagcggaggtcctcccaacttgataccgcctagtttggccattcgggcagcgatattctgtcgtcgagtagcttcgtcgtccgctggagacatcaccttcggttcctcgtttataacgggagggagagagactgtcaaagcacacgtcggtcaggctattcaaaacagcgcagtcagagagcctgaaatcgagactcaccggcttgtcgaggctgagcctcctgcgcgtcctgtggaagggctagacctacctggacaggtccagaaatgctttcctgtcggcgtgggggtggaggtggcgcatcatcatcgttgtcctcatcaagatctgattgctctgtcgtcggaagctgggtacgactgatatcgcccaggccaggaccagccgtttcttcgggctcggctgtctgacccaagaccggcgggttaggcataggtcgaggaccagaaggtttgtcgacaggtcggtcggcgcggggaggaggtggaggggcgtcctcatcatcttcatcctcgtcgtcgtccgcttcctgttcaatggcgtcgtgctcgtgtttaagctcaacttcatctcgaggcagaccgagactagccaaagcgacgctagtagacccttgcggaacagggggactggccaatgcccgcttttccacgttcggggactcgatagcgggcgattgcagcggagcaaacgccacaggcgaagtaggactgttgatttgtgcctcatcctcaggctgctgaggcaatccttcttcgatatcgatgcgagaaggctcggcgtgcatctgaccgctcttggcctgacgcagtagatcgtcatcatcgtcatcgtcatcatcgtcttcctcctgctcgtcctcgctatcgaagccgcctggcggagcaggaggaggcggcattcttgacactccactcgagccgccacccaggacgacgtcgcttagtcctcctcgatattcagcacctgcatccccttcagcaccaacgagaacaggtccatccgctttcctcgccaggtctttcccagcgtcttcggcgtccaccgaaggactttgggcttggtctcgctcatcggtctgcctctgcacctgtgctggaggcgtatgcatggcgatacccgcagcttgcgccccatcgaaaccggcaggtccactcccgacctcttcctcgatcgccttgtcctgatctgtggcaatctcgcgtcgcgcttgatccgcgacggctccgatcgccatgggcgtatcctgagcaagctgtccttcgggagattcggttgtcggggaggacacctgctctgcgccagtccctgtggactgcgagtctgacctcgttgagccagcggttgcagcagcacctccacgtctcctcggtccggctgccctcttgggaatggcaggcatggcgattccacctccaggggcggtcgcagttgccggactgataggctggacgtcggcagggggcgatgacatggtggcagtcgcagctgatggcgtttcggcactattggcttcgatagggataggctcgacctctgcactaggcttcttggcgacgcccggcttgggagccaatggcggagggggaccaccgaacattccccttccacccaacctcgccatcctggctgcgatcgccgctcgtctctccttttccttttgctcttcgctctgttctccatccccttccgcacccgcgacggacgcatcaccggtctcaacgccctgcatttcgccttcggcgacgttgaccctctcgaccgattgactactgccggaccggatgggcatgggcatctgtcccggtatgggcagcgtcgcaccttcctcgacctcgggccgtttccacgtcttgactgatttcctatccccagtctcgccagcatcctccgacttgggagctgcgggagatccccctccgaacgcctgagaaccggtcaacgcggccatacgttctttcagtgaaagaccgatcgaggctttcgcatccgaagccgacatgccggacttttcctcggccaacgtcgatgtcgatgtctgttcgtttgtgaccgatgacgcagtgaccgtggtggaaggaacaggctgagcgggttcggccggcgcgaccgcttcgcccccggcctccttggccttcttttcctcctcttccctcagtttctgtctctgactccaggtcaacccaccagccggttttggtttcaagggaggcggagctgggcgaccatctcccgctgcacctggaccggtcttgggcttgttgaaagcggcaagtcggtctttgaatgacaacttggagggctcgggggcgtctcctgattgagcttgagccggaggctcggaaggtggtggtaccgagacgggggatggttgtgccagaggggctgaagctgagattgctgtaggaacaggaacaggagcgatcgaaggctcggatgccgacgcaacctgctcagccagtccgtcgtcctgcgattcctccttgacaagctctgggttgaaagacccgggaatggcttcggcctcgggcagaggttgactaggagattggatggggggtctatcgggttcttgagctgctaccgggacctcttcggctgtgctctcttcttgtcgcgatgagacggctggtaaagtcgttggggcaggagccacgaaggctggatcttggtcttcctctggaacttgttcgacaaagtcctagcgagacccccggttcagatgacgattcatgacgcaagagatacctcgactcacccttggaaaccctcctttacgctccccatccacggattcgcccagcatccaatcttcatcctcatcggatacgcccgtcacccgaatcctaaggcaatcgagtgagcgccacctcatcagctcttgcatcccgccgatgaataggaagtcggggaacgctcacgtctctcctttagcgaatgagagatccgtagcatgtggcgacttgtacttgacgctaccgagcgagataaagttgggacgagagatcagtgatcatgcaagaaggacgagcgagtttcaaggcaacgcgatatctacgtggctttcgcgatatatgggtaggtagaagacatgtcgttgtgattgatattgattggaccgtacactagcgatctggtcgttgtcttcctgcagctcaacgatgtgttccctacgtctggacttgaacgtatagaatgcaaccctcttccaaagtcgaatgcgctggttgcccggtggtgatggtgctgctactgctgctgctctggagtctccacgcgtgatctacggtgatgacgtcgatcgaaatcaaccaacaagtcgcgcgcaaggcaggtcgatgctattcaattcttcgatcgagtcaaacaccgcggatgaaaatgggtttacgaggcgatttcatttcattcaacgtccaatctcattccatgtcacaaccatccccccgcccgttcattctctcactccttgacagatcaacgagtacacttcctcatgttcccctttcccgccatcatgcatcgatccactctacgtcatcccgctcaagccgaaacgaatcccttgccagcgtaaccatcagcgctgatacctatatacacgcgagacgagatgttcaggatggtaagcattttgtgagcacgtaataatgccccgcgatgcgaacttaccggtgatagggttgatgttggcctccttggcagcggcggtggaagcctcctgccattccttggtcatggtcttggggggagcgggggctgaaaaggcgagagacgagtcaaaatcagtccacgttggattgcgaatacggtcaaatgctttgggaagaagatgcgaaagaccgaaaggacgagatccgagcaggtgcagccgctcatacgagcacagaaggtatttcgcctgatgttgcagcgcggttccgacgtctttcccagcatcacactgccgcaacggctagcgagaccgtgtcgacgtttaaaagtgtcaagagacaaggcgtatgaagcctcgcttggccaagatcggctcgaatttcccgctgatgagaagcgacccctatcgcggctaccggtagatggcttcgtcccacaacatctactcttgaacacctcgtccctcccattcccttcccgcagggctcatccgtaggcgatagagagaaacacgtggaagccggaacgaatgaatcatgcactcaccggcactcctgatcaaaccgaagagtccgacggcggcaccacaagcggccagggtaccgatcaagatcttgatcgagtgaccgggggggttgacggcttgacgaggaccgtgagcgccgaacgctacgtagtaggctattaggatgcgggaccgtttgacgcaggtaagattttcggatgttcgaggtagggtggtgagaggggaacaggtcaggaacatcgcgtctggatgcgaggtacgagtggggtggacttgccggccttcttctcgtcgatcgtcagtgctttccagtcctgcttctggatctcggcgagcttcctattccaaagaaaccccagcgatcggatttccgtgagtgatttcggtcgatgtgtaacagaattgaccagacgatcgtggtcgacgtcgagatggtagagtgaggagaaaaaagagtcatgaatggcaacctgatcagcttcctcatccacgcccgtgctgatatgaccatctttgggcgacggcggaattccctcattcttgtggaccagtccgatctccccctttctcactcactcgtaaatctcatgacgctcaacgggcgacctgcttgcccagttgacctctacgttgcccaacagcgatccactcgagttgctcgtcgagtgcttgacggtgatagggctcgcggtcgagtacgaacggacggctcggagggcggttcgggagagggacatgatgcagagagattgggatggacctaggtttgatcgattttgagtgttatttcaggagcaaagtgggtagcttgcgctggtcctgcctgtacgtcggatgagatgagagtggtgtatatgcgggttttggctaaggttacaggatctatgcgagaaggaatagaaccacgagcccgtgagcacacgatggaagtcattcgatttcgttgcgtcaacgtttctgtggacttggtcgcaaaggtccgcgatctcccgactagctggttggttggctctcgcgagaaaagggttacaagtttctcacgcgttcagggaaatcgccttaaaacaacacagtaacaggagaggcctgcctccctatggcctatggactgctagctagacaaacacgatacatcttgcttttaaagtaattaaagtgagtagttttgtacttggcgtccatacacccgcgctaattcatgattgatgttcgcaagatcacccgccaatctcgccatgtatatgacctctttgtaagcgtgggagacaacatgggtaacacgcgatatcataccgaacaaaacttgtcgcaatcgacgctcctgtcgacggttcagtagctagtagtgtttctgtcccggcgggtatactcactcgctctctgtatcagggcgaaacccacctccaaggcgggcgtgatcatgctcactgtcttgccagatcataattaactagacgccgttgagtctgttcttattgtgagccttgtagacgaatccgtcgatgactgggacctaattgaggcgcaaaagcctcgacaaagggtaccgctggccattcacaatatggaggccagatggtctcccccggctcctgtcaggaaggctcaccgtaacgatttccttcaagctccttgtaaacagattaagaacaacaccaagcctcagcgatcgctaccgcccgatgtaaggcggttaaacgactcttcgggatcggagcagctgcgaggttgggcgtctgcttgtctaccgatcgtctccagttccggacgctggggtcgggtcgatttcgggtgcgggcagttggtcttcctctcctggaacggatcagacggccaaaggaaatcgcttgagacgaccgtcgtgttagataataggcgaagcacacgatgagcctgggtaaggccgagggtttcctagatttgaagatttagctgcaggttgcaagcgcgatcccatgcgcatcctctctacacacctccgcaccaagcttgcttaggatatcggtgttgagcggttcgattcgattaacatctgggcagatggcgtcaacggtacccaaactcgcctcgtccagattgatctccttgataaacccgtccttctagccaatacttagtcgagatcgtcccgctccctgattatgtcgcgaagcctgacttggggatcgggacggccgtgatcgcccaagctgatgcggttcctcaacacttgcgacgcgtagattcagactgtacagaggaaatatgcggagttgttgtcggctggaaatctagtcagggttagtccatgtatccttgttcaaatgcaagagtgttatcgccccgttctccaaacttgagagtccgtcgaggtacgagctacaggtgtctgtgcgaagatccgagccgagccatcaatctagtaattcgagaggggtaggtcctggaccaagttggtctcacgcacggaaccgtgccaggcctgaaagagacagacgtaagcgacgattgcgtcgccgtcctcaaacttgaccgtcaaacatcgtgtctgctccaggacgagattgtaaaaaagcccaaatcgtacatgcgatctcctagatgtcatagatctgctgtcggaagctgcgagattagtcaagtccagtcagagttaggagacgaccggaagcatataacgcttggggtatatttgacgaaggtattcgcaagcccaaattaggtgctgtgtgtgaacgtgtatggaatactaatctggcacgatccgctgctgcttagcagatggctatcatcgggggcaactttggctcgacagatggcatcctcatgacaaaggacactgccgttataaagcaactgtaggacatgacagtcggatgtcggtcgaaacagaacatgcgacagaattcaccgtcttgcaaggaagccactggccactctcgcgtggtagtgtgagtactgaagtgttaaaatgacgtaatcacctgttgaatctcagcgggccagccctcaaattacgctgccgagcgagcagcaggcgaaaagcgagaagtgatcggcgcgagggagcttacccttgatgtatatcattatcgggaccaacattgggaacgccagtatcgaacagtttgccgagcctcaagccgtcgtcgtcaatcatccgctccagatacctttgcatttgaaagagcttttcagtttcagcatcagctgtagctcccgaaacagccaaggcaacctgaacctcgacaatccggacgagctttcgacgagatcaagcgaaaccttgacgagatgcctcgctctcagtccgacaatgaggatgaagaggagagacaccctcacacgcacaagatacgcagcaaggtgagtttattgcggtctcattcgcattcaacggtcacgtccatcgctgcacgtccaagaccacaactgacggagttgaccgatgcttggcgttctgctcataggttcatcatctcgccagcgtgattagcgagctcaaggtgggtgcaggtatggagaatcagaacgacgacgcgggcaaaaactaaccgaacttgactcttgtcctataatataggtctcggtaagtggtgagaccgttgcagaacatggtcgaagaagaagaactctaacgaacgatctggtccaatcgatcgttataccttacccaggctgccgtgagtattttgctttcggtcgtcctgccacgcctcaaatccgacgtaccctaatctttcctggcttcatctccctcagtacgcaatcaaccctcaacatcgccatgacgaggaccatgagaaagctcgtgatgcaaagctcgaagccatccgggatgctcaccgattcagatcgttcgcgccgatcaggggagggaacatcgtcaagttcgcagtagacggacacgactatttctggcaattgagcgagatcatcgagcatgccaaggagagcatattcatcatggattggtcagtcttttctcgttctcgttctttcgccgaaaggctttgacggctgatagcgattgatgtgcctgtaccaggtggttgtccccagagttgtaccttcgaagaccgcctgcactttacccagaataccgactggatcggttgcttcagagaaaggccgagcagggagtcatgatctacatctcggtgtacaaggaagttgaagcctcgatgagtctcagctcggtacacaccaagcatgtgagcgtctcgacagtggcccttacgcctgagaactatacgagctgatccgactgatgctgttgtctagtggttggagagtctgcataggaatatcgtggttatggtgagttgcactcgaagggttgagtgtgacgtgcacccgaactcaaccgtttgtcctgttcagcgtcatcctagtcatgattacggggagcttacgagtgagtagaggacacggacagcgatctgaactgggcctatggtggctgataccactcgtaatttccgcatacagtgatgtggagtaggtcgccggtccttgaaagccagacaggatattacaggctgatcatcggaatacaccaggtcaccacgagaagctatgcgtagtcgataacagagtggcggccatgggaggtctcgacgcctgtttcggtcgatgggatacctcgaaccacgagctcgcggatgtacaccctcagtcattctacaagaccctttacccaggtcaggattacaacaactcgaggttgatggatttccagactgtcgaccagtttacatccaacgcgttggcgattcaggatgccggtcagtacagggcagcaaatcgctcagcgacattacatccggctgacaagactcgtacagctcgaatgccgtggcacgacaactcgctcactttcgtcgggccctccgtggtggatctcgcccagcatttcatcgagaggtgactttggtcttccgccttgaataggaccccggctgatcggattcattcgcaggtggaactttatcaagagtgtcaaatacaaagtaagtaccgtcaatggctttactctcgctataccaagctgaactcgtccttgaaagcacgatcgtcatttcgaatacctcgctcttcccgccccctttgacgagattcagccggcagacgatgctgtcgagcgtatccaagacacaaagaggcgagaacaacggcgtctagagcaccctcacatttctgaatgggccgatctcggtcgacagtggttccacccttaccataatccccccagtagtctaccgcgcgcagaagaaagggtaccgcaaggcgacttcaacgtgcaagtcttgcgttccgcttcggattggtcacacggtttcttgacagagacgtccattcagggcaagtctcgagcgatgagctatccgcatcgaaagcaaagctaaccatacaggtgttcagatgcttacatccaactgattcgcgaggccaaccatacgatctacatcgagaaccaatttttcgtcacgtcaacgatcaagggccacccggtacacaaccagatcggagctgccctcgccgagaggatcatctcagccgcgcgagatggaagacggttcaaggtaaggattcctgtttgcccacgccattagtcaagtcaccaatcctgtgtctctaggtgattgttctgattccagcgttaccagcctttgctggcgaagtgcagggagctcctgctgttaaggcgatcatcgaagcgcagtaccgctccatcaaccggtaagcatgcatgtctgattcgatgacccgagggagtagctgaccgtttgcaacatttgtagaggcggagattcgatcatggagacggtacgcccccagctcacacgccgtgaacgctccagacttagatctcgatacacaggtccgccgggcgggttacgatccggaaccgtacatctcgttctggaaccttcgaagctacgaccgtatcaatagcccatgggagactattcgaaagatggagcagaacgtgaggccaatatatctgcacttcatgcgcaaaacaagtctgatgagatgggatcatagtcaggagtcactttccatgaagcgcaggtcgccctctctagattgtgggctggtaatcccacaggtcacaagagagaaaaagacgagactgtcatcctttctcggccccacgtgagccggataagggcgtggcggcatgacattcggatctcatgcattccgattcgtttcccacaaacaggatcaaagcacagatatgaaccacgttgctcaaaagcagacagttaacaaaggggtccggatgccacctacagtcgaagaggtaagcaacgattgtcagggccgagtgggaccgagagctgagacgctgcctacctctccttgccataggctctcgagctcatcaaacgcttcgaagcgggtgcaggagagcgagataggcacatgtgagctttcacatgaatatggattgcaaatgctcgtaaagacgctgaagcgtgttacactctgatctctccagcaatgacaacggtatctattctaaatcggcgatttttaatcattcacgatcgctaatccggcccgctctcagtcggacagcactcgcaaatatgccccaccaccttgttcgacgaggactgggacggtacggagcaagaggaactggagtcttacgtatcggagctcacttatatccacaggtgagtgaatcccccctcggttgtcatggccctgcaccggttgctaatctctatagattatgggtctctcagcaagctcatgatcatagatgacagcaaggtcttgatcgggagcgcaaacttgaacgacagaagtcaaatgggcgagcgagattcggaaatagcaatctgtatcgaggaaaagcccgatttcaagatgacgatggctggcaagccacacatggcaagcaagttggccacctcatggcggcggcgcctgatgcgagagcaccttggtctgcttcgcgagacggtcatacccttggagagaggagatgagcctcatgccaatcagatgcccgctcctgtaccgaacgaatacgatttcggatcgccggaggatctcgcggtcgaagacgtactgagcgaagaattcgagaagttgtggacggggacgggcgaaaggaatcgagcggcatttgagcgcgtcttccgaccgattccaaacgactccatccgcgattgggcggaatacgccgagtacaccaaattggctgctggaatcagggtgagtggaaaccctataacgagggaatggttcactgacattcgttgtgcttttcaggttggccacgtttcggacagaagcctttcgatacagcaagttaaggagacacttgcggagatccggggccatctggtgccgatgccgttggccttcctgggtggggtcaaagacctgactgcaggcgactacatgtcggtcaatgcctacactctaccgatctacttgtaaaccgttccagcgggttccaaagtcgtatacatacacattttgctgtcgaccgccttgacagcagcgtcgacgtcgtcatcaagcaacgttgttgcgatggtcgatagctcgggcgactcgttgctcatcggaaggtgcgatgggactattcgaaaatctcgatcactcatgatgtgactgtgcacagatgaccaccgaggacattggcttcgttcctgtcattgcggtaaaaagcataaaagcgaaaagtcaaaaggctacaaactacaaagccttgtctgaaccccgttccctggcggtcatcttcgaggtccgaccggaacaccgcccatcttttgcccttctcttcgtttcaactcgttctggacatcggcttcccgcgccaatcgaataccctccttgacgatgacggcctcttccacctgtgcacgtggatgagatgcagtggtttagtacacaatcatgccaacgaaagggaggaacaacgatcagtaacgcacccagggcatcctgaacagatcactccgcctgaggtcttcctccctgaccatccctccgttcgtccccggcagcccgatctcgtttcctaagatgacgtccaagtccctggcctgactcgccatccatcggttgatgaacccggccgggtcctcggcgaacccggtcaaaaagtctcgtttctcccttcccgttcggatctgatgggcgagcgcggcgacctcgtcttcggcggccatgatcccctctagcgtgggaccggattcgagcgactggacggcggcgtgcatcttgctcttgtgcggatcttcaatctcgatagggatgtcgaataccgtcgggtgcacgttgcgatccttgtcgacgctacaggagggcatgtcagggaacaggttagctgattcgcaagagcgagcgaaaaaggacgctagaacccacgcgagctgatatgtcaacacgacgggatccgggtgggtcaagcatcgattgacgagatcggggaggacgacaaagggcaacgattgttccttgcccatcaacttttccagcccgccgacggccaacaacttggtcgcatcgtcccgatcctgtgccccgacggatttgacgagtttccagacgttgctcattatctcggcacgggaaccctcgaccatgccgatgagctctgagagcggggacagaactttgaaacgatccgggtattgatctagatgaagaatgacgcgaacctcgacgggttgatcaccccgccgtttgatttcgaatccgtcctgaccgggtagaggttgtccctggcgattatgaaactagacagattccaagcctgtcagactcgcaactcttctcttacgctatggcgggaccagtcccgaacccacttcgacgacattgctttcttggtaatcctgtggatcccgattcccaaactctacgatcatcgacctgatcaggtttgtaaacttgcgcttgacgtgcttgtctatccgttgattattggtctgtccgtccgataatcaaaacgtttcgcaccgcaaatggattgcaagaacaaagtccagacgtgcgtaataagcattctcctgtcagctacatgtggaacgctactcggggtgatcaaactggtcacgagccggactcacgtcgagcaccctcccttcgaccttgaatgtccatcctggaatcccttcacctgtatggaaattcggttcggggagactgttctcggctgttctcacggaagtgtggtgaaaaagggatcgagagttagaggtcgcacgcaagaggtgacgaccagaaggacggctcacctcgctgccattcctgattctgagccgtattcgagaggtagatccgtaacgtcctcttgatctacagagccgagtcgacgtcggattgattgttagctcacagtaacgaattctaaaaccgtcgtcaaaggccatgtactgaccttgacgaccctgcccaaggcgtcattggcctctgctcgtttccggagcatggtccaatcgagcctctgttccatatcgatgaggtctttgaacattttggattcgggaacgagcgaggcgagcaggtggggtggaggcatgggaggccggaattttcgctcgggggccgcttgtgttggtgcttgggtgctcgaggtaggtgcagggccgggaccgggtccgggtccaggtccaggttgacctggtacgttggaagtgctcgtcccggccgaaccaggacccgaggggatgtgtgggttaccactcgcctcaccctcgagtttacgtttctgaccagacggggtagaagaagacatcatcccgaaaggaggtggtcctccagcggacgggttgggatgtgcgttcggcatgtagcccgggtgagggttaccgctggatcctggacgcatctgaggcggacgtgatggggtattgaagttttgcatcgtttgggctgcaggcttcgaacagagtgtgctaggtcgtcgtgatcgacgtgatgacttggacgaaagacccgaacggaagatagatgttcaacaagcaaaggtggttcggtgacccaacctgcgaccctcttcagttgagcatatccagtgatgatgacgtcgagtagtatcagctctgatctctctgaccaaacttgaattcaccacaatcacgactcaaacagaagcaagtaggagtgactctgcagttgctaggttacgactctatctacatgattagcgtttatgaggaaggtttggctcgatcgttctgcagcatctcgtctatgtaaaccttgaagagcatggcctgtatgtccgagtcgtaacgatactcggcgaacctcgctacacgcctataggtctgccgaactagatacacgacgcaacgcgcattgtcgtcgatcatgaagtactcaacggacgttacccgctgtcgtcaagtgctctttgatgtagaggtatccacgacatgagcagtcctggtcttgaccggatcggcactgagactgtaaactccacgatgttgattgcgagtctcttatatgcacttcatggttgatcgactttccaatgaatctcgacacgatttcgagagcggaaacgcgggttcggccgatgacgaaacggaagagtgagtggttcaaccaccatgctgtagtctcgacctacatttcaatcgggacactcacccatcttgctatccattccaccctgaagatcgtactagctctcacaacctgccatcctgcctgactctacccgtctcctagcccatcatgtcctcctccgccgctggaccttcgagctcttcccgaccgaggggtccggcctcacagacagcctcgtcctcctccccagacccacgcaacagacctgtcgacctgactccactcaaagaactcttaaaggagaacctactggatgcgctcgtggctattcctggagggaagacgttggtgctcgacaaggatctcgcgggtagcctaggcttggtcgtcgatgtcggctcgctacaggtgagaggcccccctcttccccctccccccacgggtccgacgtcaacccgggtcaactaattctttcaaacgtcttgtcggcatctgaatgggcagaaccaagcagtggaaaagatgttttggctcgaaccgggccccctgcaagccccgacccgcaacatctctccttgtttcaaatgctccgttcgaccggttaatgggttgatgaaccaatatccagtcccgtccaacaacgccgatccgatgaccaccaccacactcagctctcacactcatcgtcgtcgtcgtcgttgtcttacatctaatctaggtggtcacagccttcatcacctcgatttgtctttcgacaccacatcgcccatctacctccaattcacaacctgatctcctccctgccgtcctcccccgacaacatgccacaaaccatcctcagctcggtgtacgactcaccccccctcccctcaaagtcgacctcgctctttcaatttttcctgccccgcgacctcgatcgtcccgacgatcaagcattcatcgcagcggatacgggtgcagcttatactcgtcgtgaattccggacgaacgctcttcgtctaggagccgggatcaagaacctcgtccccctcaaacccaacagcaacgacagcaacaacaacaagtcggacaccgggaaacgtctcgccctggtcttttcccccaactcgatccactaccccctgatcttctttgcgtgtcaagcgtcgttgaccatcgcttccctcgccaacgcttcctataccccgaaagaattgtgccatcagctcagggatgggaaaccttccgtcctcttcgtccacccggcgctctggcccacggccaaagaagcactcaaactcctctctgccgaaccggacgaaaaggattgggtggccaggatcaaggtgttttataccgtccctaccgatcaaatcccagtgaaggggggcgaggggatcaagtcgttcgaacacctctatgtagacgcatccgaggtcgagaaatgggacggggatcgattgcccgagaagaccggggacgacgagacggccgtactctgttatagcagtggaacggtgagttgacctcctcgcttcagagctcacctcttctcccatgtcgggctcgttcaccggaggactgatccttccctgcattccccccccctcctgccctggccctccgcagaccgccgcgcccaagggtgtcgagacgacccatcgaaacctctcccacgtctcggtgaaagcgatgaccctgctcatgaaactcgaaccgggcgtggacaaggtgatcggcgtcttgccctactttcgtgagtgtcagcgcccagcccacacacgcccacggtcatagagtcgggatgagcggcaagctgatccaggtacggtcggttgtcttgcgttgttagatatctatgggatggtcaagtgagtaacagaacacacgtggtggacaacgtcccaagtctaccgaggcagagacggacaggactgacccctcgctcgacagcctcgtttgtttccccctggtcgtcaagatcccatgtgtcaccttacccaaattcgaacccgtcctcttcctcgagacggtcgaaaagcaccggatcacctgggcgctcatcgtaccccccatcctcgtcattctcgccaacttgccgaccgtggacgattacgacctctcgtcgttgcgttccttgatgagcggagccgcaccgctcggcgaagggttgacgagaaaggcactcgcccgactccgaaaggggggtaaaaagggaccgggcaacccggatttgatgatctcacagggatacggattgacagaaactaccgcaccctgcacgtgtacaaagatcgagtacgcgttgaccaagatcggatccgccggtcagctcatcccgggcaccgaggccaaactcgtcgatatcgacggcaacgccatcgagatcgaattcgaccgcgagtcaaagcggagcaaggcaggagagttttgtcttcgcgggacgaccgtcatgaagggttactggaggaacccagaggcgaccaaggggacgttcttggagggaggttggtacaggaccggagatatcgccgaggtcgatcaggacggcttcttcttgtaagtcttacgctcccgggggtcgtcggcaaggcagcggcgagtgacgtgaagctgatcgtgcgtgggcgtttcagtatcgtcgatcgactcaaggagctgatcaagtacaagggattccaaggtgagctccgagtctcggggcgctgagtcgaatcgatcgatatgggcgactgactcggaaggtctctgccccgtagtaccccctgccgacctcgaggcgcttttgttgacccaccccaaggtcgacgacgtcggcgtgatcgggatcatgtccgaggagcaggcgaccgagttgccccgtgcgtacgttgtcccgcagggcgggttggccaaatggcaagatggacccgctcggaagcgtttggaggaggagattgtcaagtgggtcggtggacaggtcgccaaccataaaaagttgcgaggtggcgtcgtctttatcgacgccatccccaagaggtgagtcgcgacgcttgcccgtcgttctttcaatctcccgcttcatcggactgagacgacaatgaccatctgttcgtagtcccgccggaaagatcttgcgacgacagcttcgagagcaagccaaggtggacgatcaggacaagtcgaacgcttacaactcgacccagcagaagatcgcaaagttgtaagaggatcggtccagccaccgccggaccacaggtaaagacggacggagagacacagaaggaagcagtgtgcacaggcatgggaatttatcgttgtatacaatgcgagaccccgagtcattgaattgaaagtgaatcgagtcggggtttcgacagtgatccggagtcgattgacgtgactgatcagacgatcgagtcgtagcagaggaatgaagcacggcaatatgaagcctgaaaccacgccgactcggatctcggacgacctgatcggtccatgacaaccgagtagtgacaaccgagtacaagatttgtgcaggtgcttgcaaggtcttgatgcgcaagtgattcggttgttccactcgtcctggatgcgggttggaaatcgcagcacttcggaatgagaccttcctgccacgaagagcgctgggtcttcgccgcctcttctcgaccttctcgacgctatctctctagaaaaatagactacaccatttatgtgcgattcttgttggagatggcacgtcgtgaaaggctatacgtgtccttatgatcggcccctagctcgatcatgagcataaagttatcatgataatcaaatgctccgagcgagagtgatcacaaccaccctgcgtaatgtcacattcgccaccttcccgaacgacatgactcgggctgaagaggggacgtcactcgctattcggatcaaagcatcatctagtcttcggcaggccaatgagcgtgagcagcccctggctccaatctcttcaagtgtggctcttgggccttcaaaactacctactgcccatcgacccgccgagaataaaccagcgacatcactgcatacacccagagacccgagaaaaaagagggacgatgaacccgaacaagcgccggaacaagatcaatgagaatcacgcatggtcgctcccccttcctcttttcttgttttcgatctacaaaagaaaaccccaaccagcccgtccgaaagcgagctgggtggatcttcagagcaaaaaagaccaagaggtgcggggtatccgacccgccctttgatttcccatgaaagacccgtcctacaccttcaacctggagaacgacacacgagagcacacatcccggtggacccaatcaagggtaccggggaggatgaacaagtgcagacgacgtctactcggcgagggtgacctcgacctcgacaccggtctcgagctggatcgaagtctgtgggccaaaccggagaggagcgggacgtggtcagcgttcgggactcgcttggggagggccggcgtatgaggtatggacgtacgatctgcttgacgacctcggcggtggtgtgcaagtcgatgagacgcttgtggatcctcatctcgaatcggtcccaagtcttggaaccctcaccacagggactgttggaacgaggggaatagggtatgatcagccttgagcggagggcgtccgtggccacgagatcgggatacgtacgacttcctggtggtgatcttcaagtgcttggtagggagcctgacgggtcccttgacacggaggtccttgtccttggcacggttgacgaggtcggtcgagactatcgaaggatggggcggtaatccagggccgactcggatcagcacccccgctccgctcacattctcgtctcaccatggtcgagccgagttttttcggcctcttcttttactcacacttttcgaggttcttgacgttcctgctggtcaaggtgatcctgatcttgtggaccttggcgccggcggtagcaccggtcttttcaaagtcttccttggtggccattttgttgcagtgatagcgacttgttgcttttcgttgggggaaaaggtttgggcgacagcggtgactgtttgcaacgattggtgaagaagaaagagggaagcggggggggcgggcaaggcaggaagggtatgttgtcaagatgaccaggagatcaatatcgacgacatggtcgtgtgtgggtgcgtgtgggaacgatggcgcggaaaagtttgtgagaaaagcagttttgcgcgcgtgagaaagcgcaaaaccaaacacacgcacacacacaagcgcgagagaaagagagaccccctgccaccctgacatgtttgttcaacgaccatcccggcgtttcagaccagtcgaccccgcacttgctgcttctcggctctttcaagattacacggcattttatatacagaatcgtcatctcgatctcgtaaagacacgcgaaacgacgaggagggcgggtcgaaacatgtagctaaccgatcgcccgtccccaagcgggaaatatcacgcttgcaacagcgaccccgcgaggaaatcgccattccgtatcttctctcaccccccccctcttccctgctcgaccgtctttgattaatcaacaacctccaacctctatcgtcacaatcaaaaagccccacccccaagtcggtcagctttcccgtgtggaatgaacagaaattcacacgggtgtctcgattcgaagcatcccctggtactcacgctccaaagcgacctcgatcgagtctccctcctcgagggacaagctgtctggggtatcgtcatcgttcaccctgtttccgtcgtagaagaatctgttccacgcccggagggagccaaaaaaagtaaagagggcggattctcagctattccgtgacatccggcgggactggatcgaccgaggtcatccccaaaagcccacgatactcaccgaatagcagcgacgttctttccgactcgctcggcataggcgttctacaacgtacaataggcatcggctcgtcagtacgtttgctacttggtttgtcgagttttcgccggagccgtgagaatggccgtggtccggccgtatgggtctcgcgggtttgaagggtcatgaacaggtcggtggatcgggtcgggtcggtccaattccgcggtctctcgccgtccgatcaacgacactccgcctagaccctcctccatgcagaccgtcgcctcgacatttaccgatcctcaagagtcgatcgttcgcgcaagtcggcgttgtttttagtcgcaacccatgaccaggctcgagggtcggtcaagggatgagacggagcatcttcctgcccgttcgtgttggattacgggtgcgccgatgagatgaggtcctgcccatcccactttccgtgcacgctcctcgacttgggagcctcgaatcgaccgccgcacttccaaagactagggaagcagggacagggaccgacccatccctgaacgacccgcctgtcttcgtgagaacccgaaaccccgacaccgaagcccaggcccagacccaagcccggggaacgagccgagtaccaggagacccggcgaaaagactgtgtacgagcacccacacccatctccccctcaccttgagcttgttcaacctggtcgtacgcttgatcttgaaaaagacctggagatgcagcaagagcgagcgcagaaggcgagcgcaggcgagggaggcgagtcaaggacggagtcagtctagatccgccgaggcgcatgtaagaagggggaaagattggggcttacctcgttaccgtctatcaggcagagttgcgggtgtccaggggttccgtgcggttcaggttcagttcgcgtgtggacgccgtcgatgggtccgatcaggtcgaatggggtggtcgtggacgatagccatcgggcatgaagtgtgcggcgagggataacgacaaagatgacgaggaggagagggggaaagggaacggagagttgtcagtcttccatgagggttatatgattcctctcgtacgctttgtacccgagggctggatttcggatcgttggatgcttaccggtagaagtgacctatcgtcccgcgtgatcgacatcgagatcgacgacgacgcaggatgagaacgatgagaacgcgggaggagatcggaaacaggatcagccttcttgtggtatcggtcggttcccggatcgtccccctcgggatctcgcagctagatcccgggattcgaagcggcgttgatgagatatgtaccttgatgttcatagactctgtattcgccccgatcggtttgctacgatcagcgacctatgatagctcggatggaaagtgctcggggaaaggtgactcacgctgctcgggtttgacctctccaccggcgggggcggtagggggtgcttcgttgttctcctcggacatgatgaaaggtgggttgtgtgctgagggtttctagacgagagagtggtgatgggtggcgatgtaggttgtgttgtgaatgacacagagacgaatgagattacttttggttgatcgagcttcttgtgttgatggggagggtagaggcgatggcgtgaggcatattaaattgataacagacggtaggggcaggcagggaagtgacgtaattatcgtcttccaaatgacgtgtcaattccaatggagatggtttgaaaaagtaaacaacctccctcgagtagcgagtagtctttgggatttttgcaccagacaatcaaaccacaaagagagtaaaaagagtgttcaacctcgccatcgaccatacccaccccaactctagacgacgcatcgccccaagaccataccaatcaaaccatgtcatccgcagtgcaactcaagttgctcactctactcaacgtatcggccatcaagagaccctttgatctggacgtccccggaggtcatcgaagctctcccaccttgtcccgtgagactagcctcaccccgcaacaacccgccgccaccaccaccaccaccaccaccaccaccaccacatcgacgagcaatgccggttcgagtaattccagaggtaccgatggagaaccaccaaaaaagaagaagaagggggtcatctttggaggagtgatcgggcctagtgggagcacgatcaagtcgggcgaggttggatctgcttcgggctcgacatccgggtccgggtccgggtcggcagaaaagaagggcaagaagaacaaggacaagaaacgagtgacttcttctgaccccgccgacgaggtctctgagagtcttaccgccgaaacctcgactttgacatcgacatccgcccccttcgaactcgaggccgaagattcctcctccgacgacgatacccctacctcctccgcttcgacgtccaagacccctaccacatcagacgcagacgcgtttcaatcgcatttcgccatcaccccttcgatcctcgacgacgagacccgcgaggccgccgaagctcaccagtggaccagtcgacggagggtcgtccccgggttaggaagggtggtggattgtctacccaagggtcaggaagagggacaagtccagtcatctggctctagcagggtgagtcgagtcgagtcgagtcccgtcgatttttatcaatcgtgtcataaattcccccgcaatgctcatccatttgacttccgcggggacgatgatagatcacgccttccctcttgacaccgtacaaagcactccacccgaacccgtccgacatgcaaaactcggccttgcaggctctgggcgggtacaaggacgtctacctgcacggggtggatagggaggaagaggtggagcgggtcagaggggcggccatgttgcacgccgtgaaccacgttttgaagtgagtctgcttagccgatcatgcatgatcgtccgggagcaaagaagttgacgctctttgatcccggccaggactcgacgcaagatcatccgaaacaacgaaaaactagcacacgcacaggccagctcgacccccttgcccgactctttcgacccgagggatcaatcgttcacccggcccaaggtgctcctcctcctccccttccgatcgtgggctttgcattacctcgtcgaccacctctttcccctcgcgcccaaggacaaccagatcgaaaacttgagacccttcgtctcatccttttccctccccgagggcgtcgaggaccccttgaccgagagcgacaagggcaagaattaccccaaagatcacgtccagacttttgcgggaaactcggacgacaatttcaggttcgggatcaagtttacgagaaaggcatggagggtcgtcttgccaccggccaacgaggacaagttgatcgggtgcgatatcatcgtcgcttccccgctcgcaatcaggatggcgagcgataaagaaggcggggtggatagtctgagtagtatcgaggtcgtcgtcgccgacgggttggacgtcatggccatgcagaattgggagcacgttcaggtgcgttttccggcgcggggggggggggggtttcctttcttttcgatcgagggctgaccgagacgtgtgtgggacgagcagtttgtctttcaaaacatgaacaaggttcccaacaacccgcacggatgtgatttctcccgtgtcaagccttggtacctcgacaaccagtgagtaacgatgagcgggactcgcgagttctgccacagccggctgattcgtcactgtcgattctttcagagccaagttcctgcgccaatccatcctcatctcgcggtacgacacgcccgagttccgttccctcttcaacaagtcgctcttcaacgtgcaaggcaagatccgggtcgaacggaccgatttcgagggcgtcctcggtaacgtccgcaagggggtcaaacaggtctttacccgactccggggcgaggacgcgttggaagagctcgagatcaggttcaagatgtttaccgagacgacattgccggcgttgatgaagtcggccgtgagcagctcgaacaccctgatcgtcgtaccctcgtactttgatttcgtacgcgtcaccggacatatgcgcaagatggacaagatatcctttgccgccatttccgagtgagtccagctagcgagcgcatcgacaagtggtccccggcgaccttgactgatctcggcgggacctctcgatagatactcgtccaaccaagagatctcggctgcgaggaccgggttcttcaaggggaaaaagtcgttcttggtcattaccgagcgattccacttttaccgaaggtgcgtggtgctcatccctagactatgtcacgctcgagtctgaccttgaatcgtgcgcatgctagataccgattgcgaggagccaagaccatcgtcttttacgccctgcccgagcatgctgaattctacgccgaattcatggcgtcgcccttcttgccctcggcgacgggcaagcagacgatcgatatcgacgaggccgaggtgacgagtcgggtggcgtactccaagtttgactacttgaagctcgagaggatcgtaggcacggagaatgccaagcggatggtgactgaagatgagagcaagtttacgtttgtctagagaatctgtttcgatttgtatgcaggtcatcaatcactgcgcttatatggacatgtcacaaggtgttgcttcttgtatagtgcggtttcatagggttgacagcatagttaagtctaatcgtacaacaagggctattgacatatctctacccagtctcgtatcgcgtctcaggatgacctgacgactgtgatgacgtcttaatcagatggcggtcccggcctcgcaagggaacgaagtccaactagtcgcttctagaataattaagcattagtcgtggagctttcgtattcagcctggctactcgctggaggacctcggtgccagtgaccgtatctccctcgagatacacccacgtacatcctacatccaatgctttgccatccatcccgaactcttgatgatcatggctctccttggggacatggtcggtgacgaggtgaacgcctgtgaagacgacgcaggattcgagggcccagccgcggcatttcgaggagtccttgggagttctggcacctggaacgtctgggccaccgctttacattggtatgtacaggcggccggaagattagcgcatccaacaggtgctgcgcatggatcgctgccgaaagtctttttgatcccgaagttcggctaggtatggattttatgggacgacggtgtgaacggtaccgctggacgcaatgaaggctgcttatgataagtgtcccgtcgcgcgctgctccgagaggcaatgactcctgtagaaatctgcgacatttctagtggtagcacgacgcttccgggtggttctggtagatcttccagaaatggtgaaggactcgcctgagtacgaggggtcgaaggagttgctatgcccccttcggcttccatcaaaatggaaactagcgtaacctcgccgtgcgaatcgcaatcatcttgccttggcatagggtccttgacgtacgcccccggaaagaccggcgaatccagaccagacctaggagactgatacaagatcactgcattctcttccattattttgccaaattctggcgagacaggcgatcctgtaggtggcaaggcggctggcaaatccagagggtcttcctccaccaatgtcagtgatagcggtgacgttggcgatgttgcctcctcgaagagctcagcggacggaaaaaaccaattcaaggtatctcccttgatactgtaatgcattgaatagcctttcatagctcccggaacggttgcagggaatctgacctgcacttcgttcgccaacaggtcatctgcagcagaaacgattacgccgatgaacttgcgtcctttcgccaggtgactacgagccatatctaggaaaatcatatccgatcgggatgacatagaaagttgttgcggatggcactgttcgtactcacgttgcatggcgatctcgatcgactcgattggtcgacccaagccgactagctgaacgccatcgaattcttcgagcctagcatcaccatcgtcagattgcggacccaagtaagggaggtcgattaatatcgctcgccggtgcgtaggttctccggaagcaccgagatgaaaatagaccttgcgcgtcacttcttcgagcgctttagttgctaccttgtgactgagcggctggttctaaacaggactaaagtcttacggatgagaaatgtgcaatcgattcgttcggaattcgctcacctgccattctttccatcgtatcacgatcagtagaaagggaagattgccattgcgctccgtcgacatccttgctgaggtcctgatgttaacgcagtgctgaatagcccaccgctgggaattattctgctctcaagattgatcacttcaacttgacaaagtcaatccttttctaataaggtggggaatgaatggctcagtgcgagaatcaaaggcgaaaaagaacgctgaagagcttgttgcttctctgcttcttgcttcttgtaccttttaattgttgacacccatgtggatcgctgcttctgacgtagtggatcaccggcacgccacaaaacaaagtttgaaacaccgccgtcgtcacaacaacagatcgacagaagatcggcatcaaataaggttcggcagcttaatttcttttgggctcgcctgggatagcctcggtgaaaccgccgagagatcacgagagactgtgggcctcggtcggctctcggccaacctgcaaacatcaccaactaaccccggttcagatatacgcaaggccacagcagggtgttcacaagcaaaattattttagcgcatcgtttctctgcatcatgccaagcgtaataaggggatatcgcaggcgaaacagacacttgaaggtacaacttggtcggaaactccagagctgtgttcagaatcagcttgtaccgcatgtcaacccaatgatatgtacttccaatatcgccaattgatatacatgcaccggccgaatgtggggggtaaggctatcaagcgaaatcatacgtcattagtcaccgccgaacgtcgcagactgcgcggcttaccgcgatctactccacgttgtccttcataccgttcgctgaatcggacaccgcttcttcgctcaccgggccatgatcgtgcttctcgatcgagcccacagtaggggtggtcatatagcatgttcccgatgtgctgatgactgccgctcgatattagggcttagcggactattgccttggccaaagcctgacgtcacgcagtagaggcgagaaatactcgggttactttatggtcgcctcccataaccaagccccggagatgaaactgcagaagctaatttggacaacaaaccatggctcgatagcgaatcggatttgagagcgatacaaagagcctcgatgactgataggaaatccccgactgtgtgctgagtaacgatacacgaacgctaatatgagcgatttgtaaagagcgagtacgaaatcaaccacgttgttcacgatttgtaccctgatgagtctcatgcgtttcctctcgttcggctatccttggagtgattatagtgaataatagactttcctgcctagtatgcctccgctgcggccctagacttgcctccgcaaatcaaaacagcccttccgtcaaaaaagacatcagatccacctaaaaggcaataccatcagttcggggtcctatggacgataagctgtcgagatcttacaaagctctggggagatagaacctcggtcaagtctggctccggtattgtcgattgatcaagacctgggaagaaaggtggaacgatcgaagggtgattgtcgaggctgccgtcacctgccacgaggctgctttgtgtaatcggcagactgagcaatgaccctgaagacacgttggacgctgcgatctgatggaggaaatccagcagtgtccagcacttgtagcgaaatttttcgctctcggatacctcccctggactcatcgcatctgcccagctgcaggcgatcgatgctgctttcgccagagattttatactacgatggtcacggtatagcattgcattatgaaattcagcaagtgccgagtagactatgagcccaggttgtcatgagccactgttcgatagctgagttggagaaggggactcaccgagtcccagtgaagcgtaccaccagatgtcgagtaagctggagccgtgccgctccaaccagtcgagggagagtcgtgcgtgtcctacaagtcgttcccagtcatttgacacttgtacattgcccttattatatagtttgggatactgagcgagaaactatgaactaggggttagttaatcatatccagccgaagtcttgttatcgattggacttgccaggagcggtacatataacaaccgggcaggtccctttttagtatctgcatcgagcgcttgcgcgaatggccaggcagaaatctcggcctcaacctgtgccaattcgatgggatcggcggcttccattccatttggactatagagtatggatactgttcgaaaggtcgtaaataagctgtcgtaagcttcgcaacgacagcaatcttgctcacacagccgtccaataagatgacagacctgcgatggacgatggaccgcgttagtatctacatttttgctgaaaaaatcgttgtgagattcactgtgaacatgctttgatgtatcgttgattcttccgtgatgacttcgtcgatcgaagggtcgaacaagcatgcactagtgttgtcgcaatccctcaggtacgccatggaaggctgaccctggctcagcgataatctatatcacgacgagtccagtaggttgcgccgttacccctagatatcatcgtcaggactcacaatttatcgactatcacacatgcgcgccaaatgcgccgccggcgcaagatttgatgtcgcggcagctcattctctaaaaggtcccggtggaggccctggtatagagtcgcaatcagtcatcacaagcccaattagacacgactgagacgtactcacaaggtcttgagccattcttagcgtcatacctactctgaggtacataacgctgcccgaatggttcgtcgcctggccttgcatttcttgactcatagtcaagagcaacatggtctgcacgtgacctacagtactgatggtgaacatcttcaggccctccgcaccatccaaggtagtattgagagcatatagcagttcttcgtagacgccatgcgggatgcttcggtcgtgggccgcgagagtgcacaataccaggtcaatcaaaggtggaagatgtagctcgtccagagttggctgatgttggtgctgttccgcatcgtcgaacctggttcggagggtttcaacctccaagcttgataacaccggaaagacaggcaagatggtttcgcgatagatcgaatagactgagcattctatcttagccgaagcgcattctgtgggaatcactcgcactcacgtcgatcacggagcccagggatccgataacggtcgcctagcttctcgtaatctaggtcgacagagaaggctttgacgtctaccatcacttcgccgatctgaactttccgcctcttgcgcctcgagccttcttgaacgtccaggccgaccttgtccgggtcccgggcgacgaggatgtagcgtaatcctccaggaccagcccgccgaacgagattgtacttggcatccattcgtgccagcccctgctctatgtgagggacgtggctgtatttcgtgatggagctgacaatcatcgatgtgatcgaggtcgagcctgcggttcaaaatcagcaaaatacaagtcctgcgcgcgggcaaggtggcacggacctagaagtctcgcgttcaagccggcgaaagccgtgtccgttgataggatgtcagtcttccgggcttcctgccgcttcctcttgatcgccctgacgtcgactggagccgaagcattgtaggtacaacataaacctcgatcgtaacatcgtcgacaaccggcttggttacggtcgattacgagacacctgttggacagtgggcacaatcagccatcgccttgcatttatcggtcgcgtgatacggaactcgccgcttacctgactttggtcgatctgcacttgtcacaagctcgaccgcttcgcacatcacggccgtcataggcaggcgatgagagcgcaggggatgacatgtcactcttatacacgtattgtgagctggactatcgtaacacggttcagcaagttgtctagcaggtctagcgttgtgctcactcgcgctgccatataaccgacaacagaccaacttcgggatcccgaacgtgcgccaaaaacggacatcaaactagaatatatgtccggttcatttcgcgagcatatttgaagcgcttccggaatctgaaacggaacttgtagtcgtattctcggccggagtagcaaatccgccaatcagaacgcaaatcgcgcatgcattgagataacttgcatgcgatccagaaacctgggacttcaggtgtgtatggtttgccccttatgcgaccgaattttgatggcaattcgctcgtcagctgaacctagtcaaagggccccggcgatcccaacgatcgggaaaagtgcttcaaagatccacccgggtatctaagggtcgacgttatgccgatcggccagagcttaaattgaagtgactcttttgtactgtgaaagcgagcgattgtactatttggaatgtactgagcttctctatcgttgtgcttcttcagaagcgtgatcgcatcgcaaagggcatacctgtcaagaagcttgcaaccataaagccccctaggatggtgcgagaatgttgattacgattccttactttacacaataaggaaaaggttcatgaataccgccaacctcaacgcgaagcaacacaaatgacctgcgaagcttgtgacgtcgattacgaaaaggttgagggagatagggcgatcgcgcctctgaccgagcgcgaagtggaagccatcgtgcttatcaacatggaatcctggcacgtgagtcagctataggccttcgtttcccatccatggtccctcacaatgatgagctcttgaaaaacaggaagtcgatgcaccacctagttctttcacacgtcggcaacgcatgctggagcacactgcctggaagtgcctcgctgcgaatgggaatcgagttgacgttatgactgtctacatcgtacggagggaagttcgggatactaccatcaacgcttggttacgaagccagaaggactccacttccttgctactctgtgagcaggatccagcgctggcggcgcattcttgaacggtgggtcgttttcagttgcgagccgtagacagttcttgatactcgctctgcggacagaaatcctttcgacctccagatccctgggttacgtgtacttcaacgacctagcctatcccgcttatactcctttatggaaggatatttactggaatcgagcgttcgaggccgctcaccatatccactcgcctagagctggacagcgactctcgcaaaaggatcgcaacgtacacatcgaacagacgtgtcgcagctcgcccgatcccaccggttacttttactatcgacgggtaaatcagcaggacaagaccaaaagctcttctgtccagcaagatcccgaggccggtggcgagaacggaaataacaatgctcacgcggggaatagagagcgcaacactgccctcgggcgcgatagatccgacggcttcctgacctttttggaaagggctgccagtgtgtacgacaagttctgaggcgtaagcctcggttgcattcactgatacagagagaatacagagagatacttagagtaactagatccgctcgtatagttgtgcacgtgtggtgtgtgactcgaaaagtcgggaaaataggcgaaatatgattccagaatgtccatacggctgagcgtccgaagctgacaatggactccaaaggttgatttcacaatcatcctgatatactcaggaccaggctagcaggctcagagggcgataattgatggattcgaagccttcgctcgtagccgtcacatatgactatcataagttatcttaactttccccaaacatcgatcaacgattagcccgttgagctccgttggtagagcagccgactcttaatcggcaggtcgtgggttcgatccccacaatgggctttcctttttgctcttgttcattctttgcaccaccgccccccttcggaggaccccctgtccctccgtagcgattccgagtcgcctggtggcctccgaggttggctcgtcgtgtaggctcggcgagatttttttgtcgaggagactttgattccgcgcgtcaaaagcctccgtatgttacgctctaacaccgctgatcgttctgggccaaagatatcgatgatgcctggcagtctgaacattatctgaagtcgctttcaaaggcagcactctccgtcccttcctatcacggtctaggggtgtaatgatcaccagatccaacacttgggtatcacgcccaagaggtcgatcgcccccacttctagtctcagcgtggtaccagatatatcgaaacacagaggagcgcttcaatctcaaatcaatgccttgtatgcctccaaaggccaaatgcgataccagctaatgagatacaagctacaaggaagctagtcgtaaagcaaaaccatgtcgtcgagccagcacggcgaatccgctcacaaccccctgaaaacgtttttggaagcgctccttcccggatgcctcctgctcgatcgtcccttgcgctcgtcctcggtgacctcgcggttcccatcggcgctgccccggtatccacccttttccaagccagcggcgaacctctcgacccgcttgtcgccaggctttttgccgtcgtccgcggcctccttcttttgtggcacatagtcgacgttgaggtcgtcgtccccgcgtcctccacctgcttggggcacgaacgacatttccatcccaccgtccttggtccgtcgggcggtgagaataccgtcgtccctcgacttgcccctgctcgacccagccgcggcgtcccgatcgcctcgcttgagacgttggccgaacgtcgacccgcgaccgacccgtgatgacccgtcctcgtcgtcgtctccacctcctgccaccatcctcggtttcgaaagtgccttttgccgctggacgtattcctccttgtcgacccagctaaagttacgtggtcgtaattctgcggtaggatgtcgtcgactttgggtcagccgaacgaacgagcaaagtcgtgatctcgtgcgatgactcacctccctcctcgtcactgtcctgactctcatccccgtccttgtcacccgcctcgtcgctatcgtcatcggaatgagacaatccatccgaagagactctgtcgctctcgtcttcctcttcctcgacggccgtctttctccgtttctagagtgagtcgaatcgtattaaacggatgagcaaacatgacgatacgaaatggagcaccgcgttcgagacttacggccgcatgcaccgaacccgggttgagcaactcgtactcccgactctgctcgtcgacctcgaagtcggggttctcccacaattcggcgaaccggggatcttgcaggatgttcgtcgtcgatccggcctttttcttcttgccctctgatggacgctcttcctcggcatcctcgtcctgctcgtcgtcctcctcttcctgatcggaggccagtcccttcttctcccttcgtctcttctctttggcctcttccctctcttcctgcttccgtacccgctctgccaacgccttgttgacctttggttgctgcttcttggccctgatccgggactcttgctgagcggcaatcttgctctggacgaccttgtcccgatgttccgtatagctcgaagggttcgccaagagcctggcggtggtgtacagcttgagcgacaaaaagtacccgtgcatgtagggtttgagcgtcgagcttccgaccaggtgtgacaggccgagtgaatccagttccgcccgatcgacaaacttgtaatcccggtaagcgcccttccctgcgcctccctcggcgggatcgacgtcgtcctcgagctcctcggtgaccccgtccaggaaactcgcccacctcggcgcgggaccgagctcggggatgtagtatgccgacatctgtggcgagtcgagcgcggcgagcaagatgcccgatccgggcaaggggcagaggtccaagagcggcgcgtggggttgaagagagaacaggttttcacccgaggacgacttgtcccacaccttgatcaccttggaatccgctgaagagatcttggtggtgctcccgtctgcgctttggagccacgagacgttcttgacggcctcgccgtacccttgatccttgacggcgaacggacggggactacggagatcgtacaagagggtatgacccgtgctcgtccccacggcgagggagagtccgtcggtcgggtgggattgtaacccggtgacgctgaggtaaggggaggcggtggcggtaggtttcaagctcgacgtcgggaggtgcaacgacgtcaacgccgtcctcgacctcgggtcccagaactcgacgtgaccctgcttggccccgtccaacccgaatgaccataacccgtgattcttgtcgacgtcgatacagttgaccccgtcgatatcctcggccgtcgacagcttggtcgatcgtgcatccccacctccgacgacgaggggcatcatgtacctcccttcatccaggttgaaacggaagacttccttgcccgtcgcggcgacgagcgcttcacacgatggcgagtggtacgtcaacgcccggccgtacgtcggtaaccggacggtatggtgcagtcctccctgggtgtgcaactgcaacgatcggtccgcctgcaagtgtagactcttggtccaatcctgggagagcatgacgaaatccacattctccgcgtccgtcactcgttcgaatttgacggtgagttggttcaaatcccagactttcatcatcggcttgtacgtccccgtaccgacggcgtgttgaccatcgtccgtgagcttgatcttgatggcggattgaggaaaggcgaaatcctggatgagttcgagttgaccgagcgtgtgttgcgtacgggtacgttttcgagcggctccttgacctttgggacgggctttggtggtgatccatgtgggcaacgaggaggatgaggtggtggatggaccgttgacggtgtagatcctggtgtacggcgccgggatcgacgaggatgaagcctcgggcatggcgatggaggctgtttggggtcgattcaagacttgggttgtgtcgagatggttgttgtggtgtgtctatcgatgtgactgtaatgacaatgatctaaccgttgatagcttgattgttgaaataatccattcgacctctttcaactttcggtcaagagcgagagcgttcgagttggaaaatcacgtgaaacacgggtcaggcaaggtgagggagcaaccgatgtcgtgatagatatgatcatcatcatcctactaccaccacaaccaacaagatcgacacctcacaggactcgaaggtaaacatgcgcctcaagcgtcttcgaacgagcctcgatccaccgctacaaatcatcgtcgatcgactcgatcacgtcggcgtgaaatctaccgaccaagtcgtccataccccgacaaacaggttgttcggtctactccgaaagtcatcgtcaaccgtcgactcgacgattgagacgtcagcgataacgaacaactcggtcgaacaggtagatgaacatcaagaggtgaagaagaaggatctggagaggttgttggagatctgtctcgaggtggagatgggaggcaggccttcatcagcccgggaactattggtcttacccgtagagggcgacgaggagacgagcccgccgtcgccaacgctagctttcggcttggaaagcctggacgacctcttacaaggattgttttcccatcccgttggatggccgagtgggatcctcgagatcgcgggtacaaagtcatcaggcaggaccgtgagtatccgttctatccttcaatctccatctcgacgatgatcatccagcgcgctcatgttcatcccttcttcactcacattcatctttccttccgatacgtcccctcccatccccttccaaaaccctcgattgacgaccttgatccacaccaacccgcctcccggccccgtccatagctcctagccacacacctggccatccagaccctcgtccgtgatccccgatcgacctgtctctgggtggataccgaggcggcgtttgatcctgatcggaccagggaggtctttcaacgggtcgtacagaacagggtggaaccatacggaatcgggaatgataacgaggacgggtatggagatgggaaagcagtggacgaaagtagaggtgcagaagagggagaccggtcggacccgctggatagactggaactggctacagtgttcgacctggtcggggtaaaacaagctgtggaagcgttccggcaacaatccgggtcgtcgcaagggacggatcagacgcaagatgccatgcaaggagatgggcagcgaatgcggcccgggcgacgggtaggtaggatgatcatcgtcgtcgattcgatcggaccgatcttggggccttgtctaggcggaaacgcgcatggtcagtcagtcgcagtggtgcctcggtggatcacgggtggtgggatatctgatgaaccgttcgttcgtccgttcttcgcttgtccccattccgggctcgtcacacaggccgggcagagatgcaagcgttcttggacggcttgagagcgttggtcgaagagatcggagctttgtgcatcgcaagtcccgcttccgctcctttccgattcctcacccgtccttccagtgctgaccaagactcttcaccacctcgcagctgatcaactcgaccacccccttgacgggacctcgacagcttaacccttacccctcggtattcagtacgacgaccgtgaaaccgtcgctcgggctagggtttacgtatacgagcgagacgaccttgttgctccagaggacgagcgaggtgtttgattcggacgagagggaaagaaaggtcggacagggaaggagcgtggtcgaggtcttgaaaaatcgaaccggagtgagtcgggggtgtctcatcatgcttccggtcgaggcttgctgatctacatccacatggcactcgtagccggcttcgacatggacaatgtttcaaaccgtgggtctgcttcaaatccgtttcacagcatttgggagaagctaatagccgaaaatggacaggatgggatcgggatttacgacgtttcgccttgaaatgcaacaaaagcgagactcttacgacagccttttacggatcaaacccgatggcaaagaatctttgacgaccaattgaacttgatgacgctggacgaaatcttacggttatggagctggcctgtttttctgtgaatgtctacgaaccgtcttactcaaagtacagtcttcacacaagggtcacaacaagaacaacgagttgtaccttgcagatgaacaatttgagacgatgttctttcacctaggtacatagcgcctgcagttcgttttcatcatctgtacccaggattgacggcagtctctcacccaggtaccgcctgggggggcgttatcaccatcgatatctcaactgcatccatttgtgttgggaaagggaaaggtgtcattgatcacttgccccaacgcgcttctgaacaatcctggaagctcggccaaggcgtgaagatggtcttccgccaagaaaggctgcccaccacagccgatctttgaaacccggttaagatgatgctgagcgatgtgtgagagagcggcatctggctgagatctggccggcggcgtccactagcaatacggacaatcaaagcttgggctcctatgaggactattgtcaggaccactatgaaaggcgcggggccatgagagccaagtgttccaagcgagccacctcgacagttgataccgggggggagaacgaatacgcgagaactctcgcgtcagacgaggccgaggtattcgaggacgacaaagcggagaatacgatcggtcgaagcgataccatacaccctccccaaagtaggcctcgcccacgtaaacagcgagtcaattccccgaaacccttgtccgagagcaatcaccatcctccgacgcctccaccatgatgtagtgccggcctcgccgcacaggtgccctgttcttcttcatgcgcagcaatgcaaagccactttcgcaagccccatgaaccgcgaaaattgacaccaccttcgtcatgcacttctttgcccctatcgtcgttatgcccgtttgttcaatttcgatatgatcgtcccttgtcccaccccctttttcagaatgctacaagacgtccagtcccagacccactcttactcatggcttcaaggagctagggaacttgccagcctcgacctgctcatcccaagcagcggcctgcgaggtgacaacatgaaaggcatgatcagtatgtcgatcgggtgaagcaggatgagcggttgcaaatgtgaatgtgaagaacgtacccattcgtctgttcaggcaaaggtagaggaagagtagcgcaaagtcaagaacgagatggcgatcagctcgcatccggcccatcccttctgactggagagctaaggacgtactagggcacaacgacttgtaagccctctggaactgcttgcaaggagcgtactcctctcccttggcgttgatgcacttgtggtagtcgatgtagttttgctaatagatcgaaggatatgttggtcagttctggactcggacgataggaccggtgcgagtgtgagaggaacgtacgtagctgtaattcgatgcaaggaggacgaagcggtcgattagctcgtcgactcggtggtatctgcctgtttcaatcgagcgagtgcttaccagtgcctggtctggttggtctcggggaacctggcgtcgtaaccggcggtttggagctgcatcgtgtagcaagataaccggatgacaaggttgttcatgtatattcacaggcggcgagatcatatccggagaaccgaggggagacaaaaggagacagccaacgtcagaattcccgccactttccagagctctgatatgtgccagacccgacgtacgacgtaagtgctatgatgaaccaggatcaaccattcgtcagttgcatgtccgcgtccgagtctgttgaaccttcccgaccgagctcgtgcaaagacttacttttcagacattatggcaggttccgaacgagttttatctagttgaggatgacaggctcggaatcaagagcaggcagactcgatgagctgcaatgctccaattctatcgacatgatgattgcctcgacgttggttcgttgtgcgacccagttgcgcgatcgtttccgaaactgtcaacgagcgaagaaacaggtttctcacgcgtttacactgattttaaggcgaatcgatcatccaagagacgatagctatctgtacaactactagctatgacctattcacgacgacacggttgggaaacgatccaaatgcagcccagtagaccctttaagactgatcgttcggtcccagaggcaataacccgccctgcttcatatcactctccaaccgcttgtacgcggccaccgtctcgtcgtaccgtttccaaatatcatccatcgtactcgtctcggcttcttcctgcctgccagtgcgcctgacatcctccaaggcccgttgagcggtgacgaggagcttgcccatgtcctgatatgacctctcaaactcggctagcaagatttccgggcgacgcgagtgagcgaccgattcgccagcggtagacgggtcgacgtggagcggcaggttcgccatgttctccatcgccgtcgctaccatcgcttcattctccgcagagagcagatcaggatccacatgggattcgatatcgaggatgatattgccttgcggttcgccgccttgcgtttgttgtggatgtggctgctgctgctgctgttgctgctgttgctgttgctgttgctccatctcctgcctcgacctggtcgttcgcatgtccgacgtttgctgagaattcctagagaatccgttctgcgcatgtccatacgtctccgctccggccgattcgtacctcgcatcgaacccgtggaagtcaggctgaacctgggaaggcgtatgatgagacgatcgagattgactgagctcgaaacgagcgtttgggttaaactgtaaagcccggtccagcgcgtccaggtcgttcttctcggtcccttcaccaatccccgctcctcctgcatcgtgattgcctccccgctgcatcgcctcatagacatcgatctcgccaccctcgaacccgaccgggggctgatcgtccccagtcgcttccccctcggccttgtccacctgcttgcccttgcccttgcgcttgcctttgccccgcgtaccgacaatgcgtcgacacttgacgtccttgctctcgaaagcggcgagatcagcttcaatctctgcctgactcctcgggaccgcttgaccccagacgatcccgcggaggtcgggattgttcttctttttcctcgcccggtccagctcggaaggatcggcaggatcgtggcccgtatgttgccctgtacacaacgtcgtcgccatcgttgtcgtcgtcatacagtggtgcggtcagctcgatccggcctgttccgaccgacatccacccgtgcgggactcacattgatacgtcgcctcgatcaatccagtcttgatgacctttctcaacatgaacttggctttacaccccacctttgtactgggcgccctcttcctctttctcccactcttgctgacgtgctcccgctcccggtgtttgcccgagaaacaacaccggtactctgagatccaggcgtactgcaacggacccccaaacttgcgtttggacctcgacttgtcgttggcatcttgcggcaagagttcggccggctgatccagacgggcggatggggactgggtcgaagtgtgggtgtgagcgtaagggtcgtaagggtacgcgttcatgtcggcgtggaaagccgagttgagcgagtcagccgtgtattctgggtgggaaggaagttcagaggcgttgccgctgtcattgtctgtggcaagagagtctttgggtcagtgaacggtaggtatggcatggtctggtctggtccttctacggtcctcgaacgcaccagtctcttttttgctcttcttgaggtcgttcttcttttcggcgtgtttgagaaagacaaactccctggccctcgcctgaaggtattcagggatctgatgttcttcaaactcttccatgtaggggtccgtactgaactgggcgggactgaggaccattcgcgtagtagacaagtgggaaggagctgatcctagcgtcccgtcatcaacgtctcctccctggaccgcaccgtcgtctcccatcgggtgggattccgactcgtcctgtggacgccccctcgaaggtccgggcatacccgtcgcttcatcgccaaacgaccgttcgatcaaggtgcgatcgtccaggtcgagctcgttcaaccgacttcgctggtcgatgctccctgccatgtcggcgaattctgccagggtggtgatcccggcatgatcgttctgtccgaggtcgtcacccgattggggcacggtctggtacagcgctgcggcgtcgtaatccaggttgggaagatcggccaggtgaaccaaagggttgttctgctgatgatgatggtggtggtgatgatgatgatccatggtcaatgtcgacgtcgttgtcgtgactgactggacgctgattgtgtgtgaatgggtggatatatgattcaatcacgtccccgacgacttgttggtggagataacccggatcgatgatggatatcgataggtcgtcacgatcacctattaaaagtcagggataaagttggggcactggattgcaaggcaacgttcgataggtgtcgtatttctggcttgacctggtgcttgtgataaaggactgacacgtcgaattgtcagaggatgaggacgaggtaggtcgaggtcgaggtcgaggtcgaggtcgaggtcgaggtcgaggtcgaggtcgaggtcgaggtcgatcgaacgtttagcttttgaatttcgcgcgcgcgttgccatttgagagaatcgctcgacgacgaagacgggctagaacggatggatccccgatgatgtttcatgcttcttttttaatagtagtacgtagtggagtgtgtctactaagctactacagactagaaatgtagagaacgtaaagatcacaagctcacaaaatcgtatagtttactgtaatcaaactgttgccctcccgtggcatatgcaggtggaaagtcgcagtagtttggatcaatttgcctcatacgcgaaacgagatatagatgcaagcaaatatcatgagagatcgagagactgcaactttgatcaaaaggagaatgacctgttccaaagtagtcgccaccccgtgaacaagcagcgctgctgccgtgcatcactctgaagccctgccgcgtctctcccataaaaaaggatacctggctcaagattgccacactggaacgccagtcaggggaaatatgactcaagaaacatgaatataggacgctcaaaaccctggtctggatgttgagacatgccatcagcatactggtcctctacccgacggatttccgggtatcaaccgtcttccgctcgatcccagtgcatctcaaaaccctggacgttgtcccgctagaccccaagccccaaccgcaaaccctggacgacctggcgttccaacaaggtgccgaggactttgtccaagccgaaaatcacctctccgagtggataagtgaatatcgcttccaataactcgcggaacggatgaagcccctcgaatcgtctttcactcttccctcattccaaaccattttctttcctacagcaaacatccgtgagatcatcttttatgatgccagcccccacagcattcaagaaggagagtctagtgaaaagcgtaagactcgggtctacgcggtgtagcaagcgggaagtcctgcgcctctcgtcacagtccatgagattcccaactcagcgccgagggacaacgtcggaacagactttgacaggaacctctacggtctcgactggccagttactctcgcttctctgacgaaaccgttctgtctcgttcttatagccttcaaaggagaatggggtctgaccctcgggaatcagagtggaacgctcccgtgctttggccggctcggtcagctatactcagagtcacacgaccgacccatccatcgcgcttttgttcgggctcgacgaaccgaactgaaccgactgatcgtcacacggcagaggctcgcacatcgtgtttacgttcccagtccggcctacctatcgcacgaacagtctgtgatcgggctttgcatgcagacgggccagtcgctctggatcgattgttgcccggccgagcccggttcacctggccaaatcgagcttgtgacgagatcgaccggcaaacgagtctcctgagcgtgcccttgtcccttatccatcagagccacaggacgagaggtcgacgccggatctgtccgctgcggaagggtatccgtccgagaagaagagaagaatcggtatacactttcctccccacccatgctgcttgctttcacgctcttttatatgataacacaatgttgtctcgcctcatcatctcgtgcactatccatcgacgtccccgacgtccttcccacagacggacgggggaatctattcttgcaacttgtacccgacgaggttccttcgaccgatgatctcgccgatcttgaagataccgtatgcctcgaggccctggagaggttccgatcgatcagagtaccagagggagggcgtgtcgattggggggatagtcggcagggtttccaaacgagacgaagaagcaagcaggagaagggggtgggtatgacgagcagccccgatcagcattcgtgtacgacgggcgacctcggtgcggggaactagctagcgacgagaccgagctgagagactcacgacgatcccgaccttggcccactgtccgttctgtgcgagccctctccaaaagtcggccgaagcggcgttggaccagatgttggcgtaactgttgacgtacgccgagaggttggtaggcggggccatcttttcggcttggtagacttgacgggcgagcgaggtgaggactttgaagttgtacacgagggggtctttgtaacctggttcgacggcgagagcgggcgcgcatggcatggcatggttagtggagagtaattcccggggcgtatcgagctccgaggtctcgggcgctcgtcactccgactcgctcacctcccaacatgcttccaactttctcgccgataggtccagcgaccctctttgcggatccgagagcgttatcgtaagccttgttggccgattcgacggcagcctttacttgagggttttgagcctcggtcgaagcgaatcgacgcgagatgatttgacggaacgaagcgatcgtgggacgggcagagacgcgcatggttgatgaagcttgcgggcggggttgggttctagattgagggtagaagtaggtagataggtagatagggaggagggcgaaggtgtggaagatgatgatgtcgtcgagttgaagagtcgagtagtcgacctcctcccccccgagcactcccggcgtgttttcccccgaatttcccattttctcacgcgcgcagagggaaagatcaacgagccacgagccacgagcgagggccacgtcctcgtagatcgtagagatagatcatctcattcaacactcacaaacacatacaatcatcatcaacagcgtcccatatcacactcacacacagcaccgtcatcgtcgtcgtcgtcgttgtatcaaaatgaatcccgccgtgagtaataccaccgcccactgacgtgctctcgctcactcccacgccttccccgactcgcaggtcaccaacctcgtcttctccctaggagccatgcagatcgccaaacgtctgcctctggaagatagcgatttcatccagaaactcaggttcgggtacgtcgccgctcaggtcatctcgctcgcaatctacttttacatccagtaccaggtgagcccccacagctcgtgcgggtcgtgcgacgagatcgctcatctcatctcatgcctattgctgccgccgacgacgcgcagatcaagaggaagaacgacctgaccaccttgaaatacgttcaacccgcttcccccatgtcccaagacgagggcggtctggtcaccacgaccgtcagggattacgacttgcaagagacttcaaaggccatgaaggggttgttcaccgtgagtcccattcattaccccatgaccacgatcacggtgtcgtagtcgtagtcggaacgatctctatcttcccgccccacttcgactcgagaatgcccaggctaacatgtcgactcggattttctcgtcgtcgtcgaacagggaatcgcctttatgggattcttgcacgggtacatgaactacacccagcccttgttcatccaggctatcatgaccatcaagggtgtcctcgagtgagtccaacttggccccatcgtcgtcgtcctcaccaccatcgtcgtcactcacacgtgaacgtcccgctcgccctcgaacgcccaggtccaaacccgccaaactccacctgtacggtcaaaagcccgaaggagacctcgcccgaccgttcaaatcggctccagggatgttggaacagtttaccggacaatccagtcaggtacagaccgacgcggcctcgatcaagagcgccgagaagccgacggggagtaagaaggatttgtaaacgggtcgacctggggagggtccggtcgggttctttagagccccggactaagcggggggttgagcccgggtatggaagggcgtctcgagtgggcatgcagggggcggcggagctagggaggacgtgctcgagagatgcgcgtgaggagactcgtcgaaccccgatcccaccgcaccctcgtcgttcctcttcgtcacgtcgggtctcgtttcgtttgcttgttgtacgtcgagacgtcgtcacgaggacatttgcatagaacattcaaaagagaaggcctatcatccatccgtgggattcggtccgaccttgtctccgtcgttgtggtttgctgttcttcagggaaagctggggagacaaaaggtagacatcagcggcgccaaccggtcacgatcatcttgtcctcgaggcgtaccctgagtagaatagaggcttggaacgtgatggcacacgatgccattgctcgacgaaggcgcccgggccgtgagctggcgactctcgtcttgcaccttggtactggcatgtattgacgtgcgatgaacgactacgattccttcttttgcttgacctcgttcgtgaaatctcatcactgcgacgctcttgcgtctgcttgacatgtcaatccaacttgaagtcagctctattgttgtatctcttcttgcatcgcatccatgagctgatcagtctcaacgagatgatgctttcgttcgttcctcgtgccttcctgtcaaggcctatctattgatcaagcgctgtgaggcacaacgaccgatactaaggcttcttctcggaggggctctcagctatgttgtatatcaagtcggtctggagtaacgaccttgcggatgagattgacctgtcacggtcagtaaatggttgccacacaccttgtatgtcaatcttctttgcaagcgcgcgcccgtgttgatgacgaaaccaaaatcgagatgatgctcaacctagactaagtctattagacaactactactgactctgttctttccccctcgaccacccccttcgactgcctacagtctagaataacaacaagagagccttttcatccgaccaaacacaggttggtatcaggcaatagccagccaaccagcgtcaacaagctacaccacgtaatcccttcacgactcgatacaaatgtccacctcgtccaaccgcccttacacagagcccgaactcgcagcctacctcgagcggatcggcttgcccaagagtgtcacttccgagtcgctggtcacggagatcgaacgcgagccggaaagcgggttcggaagggtgatcagggctcatctcgaaaaggtgcctttcgagaacacgttcatgtgagtcccccgcgtcggtcgttatcgtcaacggttgggctagagctaacgaccgagcgctcttcagtcatcgtgagtgccgatagcctgggatgtgtatatccacaccgtccaatcgctaccgaacgaatcattgctcacgcaagcggctcatctcttcgcattgcagtcgctcgacctcgggtatcgcccgctctagaccccgcctcgctgcacgaccggatcacacgtacccatctcgggggttactgtttcttccactcgttgaacagtaccaacctcgtactcggtctttccgccgtacaggaacgttcccgatcacacacccagaccggggcgagggggtggaggttatcagaggccaggcccgtcttgggtgtggtctgtataggaaaggaacgaggacgacctgtctttgagagtcgcagggagcctacacactgcgtgacattgataaccctgcagcagaacgctcggacggaacggtatatcatggatgtcgggttcgggaggaaaggtccgatcgggttggtacccctacccatatcggaagaacacgacgcaaagggacaagtcatttgggacaactcgttgcgcggggaagcttggagggtgaggcggccgaggaagggcgaattgcctggaccagcggaagggttggaggcaaagtggatggagtgtcatcctctgaccgacgatgagggtaggcggaattacgtgatggagcatcgactctttgccttgggagaggatcccagcgaggatgacaatgtcgacgaggacgaggacggggacgaggcgtgggagacgttgtacgcgttcaacaccgcccgtcatgacgacttggagacgttccagaccttgtccgggcacgtctttgagggtgccaaggggtgtacaaccaagttcaaggatcacttgacgatctcccggacgtacgacctggagcgcgggcccgagttccccgacggtgtctataccggagaggaagctcgttcgatggggaggcttgcgttgacggacatggtcttgtcgacgttcctgacgaccgagacgggcaaggggaaaaaggagattatcaaagagtatcaagacgaagcggagaggaagcaggatttggagaggttgtttgggttgaaggtctgaatcaacgaagcgggagtgtcatggctcgggcctgcgacagcggtgcaattgagcagatcaatataattaacacggatgttccatcatctctgccaacgtattacggcgatggtcatgtcttctatacatgcatcgtcctcgtcgtggttggcccatgccaaatgtcgaccaaacctaaaaccaatcgacatatgttttgcgtatcggtgaccgcgaagttggttgttcggtgtcgtccggagccgaaactacacaagatacgatacgggacctaagtcgcaagttggtcaccaaccattccccaccgggacacacatcgcatagattcttgactctcctactcatctcttgtccatgcccaccttttcaatcgtacatgtccaaagcaccgacaagagaacgtgatttacggctcgcactgcaacgataaacaagtctagagggaacgctaccatggagggccatcacgacacaaacaacccgttcaggtatgcaaacggtgacccgccataccatctcgccccaggtccggctcctcctacgatgtacttgccgaatcatccggaacagaggcatgtgcagaacatgatgtactattctcgtgggactgcctcggaatcggccccaagaccggcgatggagccgggagagtacccttatccctcgcaacccccgcaagtccgagctgggccaggaccctccacccaagaggcctataggagtacgtatcctgcacatcatcaaggataccaaggagatcctgtctacaaactctcagagcccgttggctggtcgcaaccgagtcctgttcaagctggtaacccgaacgacccgcaaaatgatgcggccagcagcttgaacccaatcacgtcaacgacgactggtcccgggcaagcgaaaaaagtccgaactcaattctcggcttgtcaagcttgtcgaaacaggagggtcaaatgcgacctcaaagacgttcaggaggaatgggagagtctagagatcccgtcggatactcccgccaagcacggtgcaggtgcacctccttatcctccgggtagcgatcataaattcggaccttcccttccacccaacctcgtccccggacaaaatggaaaccccttgttggaccctgtcacgggcgagatgtaccgcgctcgaggggtcttgcctacggggaaatctcgacctggcagggcgggacgcaagaccagggatataagagcgctcgggagggatcaacttagctgcacgaattgtttcaatcgaggcacgggttgtgtggacgagtacggggatcgtagggagaggaggaagggcggggtaggggactcgggcagggaggtttctgcaaccggcttggcggaaggagggacaggggtggataggagacgaggtgaagtcaacgctgggaatcggttcaatcccatgggaagcgatgccagaaatttaggaccatcagccacagcgttcagacagaaccaagggcatcttgttgatcgaggtcagaggcccgctttggtctcacatcatagtgcgtcgggatacccgcgtgattcggaaggacacttggcaggctttgcgggcgaacaaagcttgccacccgccatgccgaccgtggcgctccctcaacagaccgctgccgcctttgaaagacctctagggctgtttgacccgaatccccggcagtatccgacgggatcggcgtcttcagcccaggtcttgtcgggacagaatatggatcaaccggaatctcttgcagttgatactcgcgagatcggattgacggatccaagatgtgttcccgtacatacgaccctagagtctggcgtatcaatggggatgaccactacctactccgactctgcaccctttcgagagcggtatgtaggaccaccggcctcgggtccaattgctctcgctcctgaaagtcagaccgggcctgtgcaatcttcgatggtccctcccgttgagccatcacgcacgctcaatatgatgatacacacaagacctgtgatgccgaaaaggcaatcggtatccacaccaacaaccactcaacccagtataccggatcctatcgaggaccagggcgaaggggaaatccccgacctctctcgggactttttgacgagcgccttctaccggagattccacgtccaacgaccgatctgcgacccgatggatttctctcgccggtacctcgcccaggaccctcctcgagcgtcgcacatgggcaaagacggggcgatcctcgtccatatcatgtacgcttgggcttgttcgtacggagtggacgagacgggttgtctcgacgtgcccgaaaggaattggccaggaggaatcatgccgcccgaaacgggctacgtgtggtcccatgatcaggttcgggatcgagacaggttaaagcgcagggccaagacagacggagtggtcgccaagatcctgaaggagatcgacgatgctggtctgatgcggcgccattcttgggacggggtccgatgtctccttttgatcctccctttgacagaatgtaagtgtctgtacagccttggtcagtcgtgacctcgagtcgctgactctgtaacgcgcccggtagacgtttcgactccaatggagcgactggcaatgtatgaatgcgcggtggcgcaagtctttgcgttgtgttccctatcgtccatcggttacgacggtctccagcactacctaggtcccgagggggacatcattcgggtccggctttactggtacacattcgtacacgagggaatcacttccggtctcaagggtggacgcctagtgctggacgaggacgatttagaaaactttcaagcgagcttacctcaaggttgggccctagtaagtcgtgtgtcattggtcgtcgacaatggaaggcagttattgatggtctcgctcaccaggtgacccgatcgtctgccatcaaatcggttgccaagctagctaccgccccgatccgtcttgccgtaagcggcaaagtcattggtttcagaatcttctcgttgatgtgctttccttgcttatcaggtcgcatgccgtctcatacacaaagctctgaccgggcccaaggctcggaaacgagaacgcgttgacaagcggttgatgaatgacgcttgggaagcgcttgaaagctgttgggaagaattcgaagcgatccgaagcgagtcgccgggaaacttcttgcaaaaggacgacattatccgttttgccgacggttgggtgagtcctcggcgccaacctctgcgccaacctcaacgcaggccctgtcgactgatcacggcatctcgatcgcagcgcatcttcatgttcgaagcgcacaacgtgatccgagaatccctcgaacatcgatgtgctcatcttgttccgcgacccgaaggagcctttttgacggaactatccctctcggccgaagagacggatcctcgtatccaaattcatcgggagattcagcatctgcacgacatcgctcgttcaaagtgtgaacaactgacaaggctgatcgtggacattgtgaagatgcacatcaatacgagctttttcgagtgggatgccagtctggttcgaggcgagtcgtcaaggcggtgtgtctaccatcgtcgagtgctgtgctgatttgttgagggatgccgtggtcgaacagacgggactttttatgcggccatgctactagccaaagatcatggcacggaggaggacgtcgcggcttgtctgcaagctctcaacgagatgcgatgggcgtatgccaagacgggcgagcgatcgaataagtgagtccgattgacatccatgatctggccatcattgctgatcccgaccgccgtgtctgcgcagacttcgagatctatgggcggagcgacaggccaagctggcgttcccggcctactcgacccctttcggctcgtcgaatgcgtcttcggtcactccaccgagctctggcatgttgccacccgctcatagtctgatgaccgccatctcgagtttgggcgccaacgtcagcggttggatgccggaaggcatgttggcggacacgtcgagcatcagtcaggcggtgggcacggactttgtgggggatattgcggattccgcaggtgctggagcgttgccctcgacggctgccgtcccgccatcgttggagcattcacccacgtcactagcagggtcttcacctccggtcccgagggcagacgtcgggctaccggggtcatcctggcagacaacacagatggcaccgggacctgcaaagggcctctttgatgcgtatactccacccgaagacacccggccggtccttcctcagctttatcactcgggagggttgccatatatccagccatctgctggtatacatctatcaggacagatgggcggccaaccgcaagtcggtgtccgcgatcccgcgggtgaggtcttggtataccccaagacggctaatcatagaggttatgcgggatggcgatgatagcggggaactcttgcaagtcgaggcaaggtgtagggcgtagagctatgcacacatctttccattcttagttatataataacacagtaatgattatttcagtgtaattcgggttttaaggcttgtagcacgtagcatgagggataccaacgcttggcatgattccgaccgcaatagctggcgtgtgaattccgacctgctatccatcaaactgttgcataccagctttacgccaccctgaccagatatacgcaagcttttccaggacaactacgctatggctccagcggttctcaatcgcaccgtcaaccagacggctagttttggatatcaggatgggactgccgggtcactctttgtaggtagtaggacaacaagacgcaatagtcagggcgacagtgattggtcgaacaacgctggaccagcctgtgttctgtggaggttgactttcgacgctgtgacggggacaaaagaaggtcgcggttcgcggaatggggcggtggttcctgctcggaaagagatgatgaatagcatgtgaccatgtggcatgaggtcaaagccgtgggtggatgggtgggaatttagggttctgccctatcggatacggggccaatccccatggtcgatgatctacatcgcagtccaatcacatctgatcgttgttgaagatcatggactacacccgtttgtagctggctgggtctctttcatgcaataatattattgtctcaccgactactttactttgacccggattcaggaactggtgatcgacgttgcctgcaatccagcgctcgctctcggcgcatcatcggccagtcgatgacatccgcatagataggtattcttattcatcgtcgttacaccgaacccctggtatacgtgctcttgctgtctactagctactcgaggcgattcgtgttgaacacagcacactccatccgatcgacctacttttcctcgaagggtacttgacggtcctttcaactttcaactcgtcctcgcttcgacgaccttaatcctgtcgactaccatcaatcagtcgacaaagcataatcatcacctagacagcagactctggttggaatagggttgtcgcattctgcctcgacgacgacggcgacggcaccgacagcgactcgaccgccagacgataatgacaaacggctttgaccgaccgaccactctagcttgatctcgcgaccactagacttcgtttttcgactctccctttcgctcggaccttgcccaatctttcgaaatcaagtaaagccctacgaaaggactttcgggctgagagtagtatcgattgcctcatcgagaaatatcggatctgaacatatcataaccgccaggataggccagatcgtcacttcagctatagtccggcaggcatcacgcacaatagcttcatagctacctctgaacccgtgaatcctggaccagcggacgtggacctcgcatggttcggaacattgtcaccagttccgaccgacctttcgctgctgcgccgctgtagcgtcatcgaataccgtggaaccgatacggcgacgctgaccgaccagtgcgatgcttgtccaaggtggaccccggacggcggttgataccaatgtgccacatcgaccgccctactcgctggatccacaatcgatcagccctcgtagcgttggtgaaggccggtttcgaaccgcacaaacaagccataacgcccgagacggtctaggtcagaacgagccgagtgatcggtcaggcccatacgaagcccctccggcttcctttttcgtccaagctcagtacccgtacgactcttcagacacatcatccttgtctttcgtcaaagacgatgtcatcgaggtcttgacccagcttccctctggatggtgggacggtctcctcgggctcaaacgaggatggttcccaagcaactatgtcagaaagatcgagccgtgggaggcagaggcttggtacgacaagttggcacaagaggtcgaggtcgtacaagaagacgagaattccgaggcgggagaaaggcaggaagaggttgatggagaggatgatacgttgactggggtccgagccaagccgagtcgtcccttggagaacgaccaagagctcgggatcgcgacacagagacattctggctcgcaatacgtcgaatcaccattaccggacgattcacctacagagagcggtattatgcatgacgggctggatcgagcgtctcaggaaaaccggtcgtctgctgaggggcttccaatggcagatcaagagcctagggaacagccagacgaggagacgggtaacgctgaagatttctgggtaccgaatatgactcaggatggtcaggtcagtcggtcccatcgctaacaacggattcgctacagtctcactgatacgcgatctgtggtcgagatcgtgtagatctactacctgaacaccaagacccaagagaccgcgtgggagatccctcacgccgattccagcgacgagacagaggaaccagcttttcccgcccctaaagaatctcgtcgaccgcttcgggttccccccagaggcagctcgatcgggactgcgggcgactttgacgatattcgagctcaggccgtagggttggagaaccacggagggtatgggttagacgacggtttctcaccctatggtctccgcagacggctcagcgagatcgaggaaggtctcaacgcgcagtatccaagagaattgcagaagaaaggcaagatatcggaacttttaggtcactcggtctctggaagcgtggacatgaacgcgtatgctagcggttcaatacctgcgggtcgaccagggatggataggcgacccagcgagatgtcggtcgagtcggtcaattcgctgggaatgtcgggtcgcaagacaggaacgaacggtagttcaaaaggcaaatcacgaaaggggctcggggaagctctgaaagcgtttggaatctcgcggaacccaagccttaataatggaccaggacaaacgatgccattcactggtccctcctctagcaaccaccacggatcatcatcgtccggatggaagatggaccgtttcgggaaaaggctcagcggcacgcctcgatcagatcactccgtactaggccccagtcctccgagcaaccagctaacaagcgtccaacatgccgtaccgcttccaacggacaggtcccgacacgcgagcctgcgtaagagccaggagagcagtactgaatcggctagacgcagaagcctcttagtatgggaggaagaagcgaccctccagctcgaagctgctgtcaacgacgagcaggcgatgatggatctacaacgaaaagtcgacgacgtgacgaccgcactggatgagatcgtctcggcgagtgcgacctacttgtccgtctatgaagcgagagagctagagattgaatctggcacgatcgacgtgacccgtttgaaagaagctgtcgttcttcgccaagctgtgctaggcctgagtacgccggtacgacgtctggtgcatgcgtgtcggcacgctgtgctgggccttcccgacatcgtcacggaattcctattggacgacccggcacaaacgcctacggaaaatcacgccctatcgttcctgtccaaggaagaactgcactcttctcaaaggcgaatcgtcgccagtctcagcaagatcgtctttaccacgcattccactgtgggaatggactggcccgtccggtcttgcgcggaaaaactcggcaaggacgcgaccgatgtgctggggagcgtcgaactgttcatcaacgaggtcaaagagttcggctgtttaagcgggaatggccgaggcgtcaagcatatagaccccctctggggctttggcgagatcatactccctcgtaaacgagaatggaggcgactcgacgaaaagagtctcaaattggttgagcagctcgttggcgctatggatcagcaagtcgacagactcaatgataccgattcagcagtcagcgatctggaacgaaggctccaattggaggaagcgatctctttggtggagaaattcgagatgaccctgcggaatcttgatgtggctgcgacattggatctcgatacccttgtgactccttcggaactggccgaatcagcagtcattgagtcggactcgacgtacgctgccctggttgtacaagccatcgagcacaagacagcgtacgaggacatagttaccgaaacgagggctgcttctacgcgcatgatgtggagcatgatgcaacccgatgcggagcaccgttcatccgacctcttgctcgagttacaagccgtttgggcgaaaacgggtacattgctcgaggagatggccagtaatgcgacgcgtcaagccgaagtcattgctagcggtcagctcagaggacagatcggcaggaggtctgcccgggttctggagcgagaaaagattgcacgtcgaatgcgatcctcatctcggtcgagctcgctcgcttccttgcagcaatttgctccccgccagaatcgcaattcgcagttctacgacgatgccgataacgaatcgttgaggtcgcaggatctcaacagtcagccctttgcggctcgctccaatcctagcttgcacgttcgtcagcaatctgtgggacgaggtgggttatcgacctcttcatcggcatccaacctgtcaatcatgaacgacatggagaattcggcgatgatgtcggccagaagcagtaccggcaactttatgaagggcggtatgagctttcttcgaaaccggtccacgagcgaggtcgatatccgtgagtcgtgttcgttcgtagaaaagaccttctctcactctcactgctatcaggtcaatcgcctgttaacggtagtaagaagaagctcgccaagtggttgggtgaagaggaagtgtcagagatgttagatccttctcaaatcagacccttggtggaggagaacccatcgtacctcgcggtcgactacgctgatgacgatgtcatcctgtacgtggatggctctgttaaagctggaactctgcacgctctggttgagcgcttgacattgcacgatcgcacaggtgagtttccgtccgcccttatccttgtttcatcttcgggtactgacgagcgttctctcagatcattcgttcaatgcaacgttcctgatgacctatcgatcattcgcgactggggtggagattgtcgactgtcttgcaaggcggtatagcatacacccaccggccggcctgacgcctgaccaagtccgagactggcagactcgtaaacagaagccagtcaaattgaggtaaggacatggtgaatcgacacgaatgaagacccagactgatcgtctgaaatgataaacagggtcttcaatattttcaaaacatggctcgaccagtatttcaatgaggaggaggatcccgaggtgctgaacaaggttgaggctttcgccgaagaggtgctcgctaaagacgtccaggtcaagatgccgcatcaagtattgcttcgagcggtgcagcgccgggtaagtacgaggcttcgatttggcagttagacggctcgctgataaccggagcgggcacggtcagcgaaccgtgggcgacatcggagcccgccgtctgaccgtcactacggcacaaccaccccctccaatcgtgcccaaggtcaacccgtcccgcggcgttcaactgcttgatatcgacccagaagagctcgctcgtcaattggccatatttgaggccaacctgtataaccgcatcaagcccgtcgactgtctcgacacggcatggtccaggagcaatccggaagacggagccaacatcaaggcgatgattttgaccagcaacaggatggccgcctgggtcgcccaagccatcttgacgcatatcgacgccaagaagcgagcccaggtcatgaagtatttcctgcaggttgctgatgtgagtggcgtcctcgctactctgccgaaaagatgacgtgaagctgagatctccctttatcagcactgccgccggttcaacaacttttctaccatgtttgccatcatggccggggcagactctactccgatcaaccggctaaagcggaccaaagatcaactttcggccaaatcgcaagcgttgtgggaatcgctggacaagacgctcgacattggtaggaaatacgctgggtatcgcgaattgttgaaacgaatcaacccgccctgcatcccgttcctcggtgagtttcgagagatccaaggcgagcctaccgacgtccgaggttgaccgggatttgcttgaccatggtcgcgtcaggggcctacttgacattccttacggccatcgaggaaggcaatgccaacatgctcccctgtccgacgaaccctacgaggaaattgatccactttgccaaacgtcaaaagtgcgccgatgtcatccgggagattcagcagtaccaagcgaccccgtatacgttcatcagcctacccgtcgtccagacgtttgtaagggaacggttggagaacgtagagaacggtccggatgcgtatgagctgagtctcaagttggagccgagggagagggaggacgagaagatgtgagtcgaaggtcgggcgggtcgctgatccagtggccgcggagtgactgagcgtttgtttctccaccgccttccctttcccggcaagcagtgcacgtatgcttcgagattcagtgagtagtaattgagagtctgagacgatggacgacgtcatcgcagagggattgtcgctaatcaggattgctgtgtctctcgtcttccgctagggaatgatttaagaagccgaccacccgcgtccatgcggtgatgttccgcgacgtatgcggtcaattgaacgagagcgctcggatgggagagatgaagcgaggttgtattcaacgtccctacctgcgagagtcgtggttcaagagaagtatatttatccccaggtccaggtcgcctgaacgtgtttgaaaagagaatggtccgcgagacaaaggtatctcgacatatgtattcctctgtttagcatgttttagcatgttagcacgcgtcgacttcggcgatgaattctccgaagctttgcaggaaatctgggaatcagcgtcgttgggacgacgtcactctgccaagacctggtacggcaactactgctcatccgacctctcttgtaatcctccatcctgtgccgataaagtcgatactcgcagtcgttatccatctactcatccctatccaccctgaactctgccctgaaccgagattgttggccgaagtgaacgatcgcgcgcgagagagcttttagcgaaacggcatattcaattgacgtcgtcgtcgtaacaagcgacagtcgccctccatacacaactctactacttggcaggactaagaccaaaagcatcatcgccgtcctaaccacatcctcttcggcgtatcatcaggtcactcgtcgacgggtgcttgggctagcagagcgccgtcagagtggtcgatgccaccttccaaccaggcctcgggctcatcggcgacgaaaaggagattgacgcatacccaactcgaacgtccgagctacctcgttcccgacccatcagagatcaacctggcaaacccgtacagccgatccaattcaccggatctcagattcgtagcatcgtcatcgtcggcgtccagcaaccccgcagccacgacgggattgtcattaccagccgtctttgacgtgtcggacgacccggtcgagtcgataccgacagcagaggtcagggtcaatatcaatggaggcggggatcttctatcgagatctgcaaggcccatcattgtcgatagcaatagcatgagcatcaacctggccatggccatggacaggacggacgaaaaggggaaaggccatgcgacgtttggtgacgagtgggaatggcgagatctcccctgggtcgggtacgacaggttcacagaggctatcagccaattgccgaggtattggaggagaaaaactagggcactgtccccagtccctacgtatcgcaaggccagacgacgacatagcatgatcctcaacggcggcctcgacgacaacaacaaccccgcatcgtgggatcaccgtacccggacacacgctcggataccctggaaacggatcctcgtgatcctcctcgtcctcgcagggatctttgtcctccgaaggagacatcgaatgtccctgtacccgttcgcagaggaacccctccctgtcgtccgaacgcgtgactgggaacatcgaccgttgtacgggtgtttcgacccggaacgcgtcgagcggacagagtacaacctgacccggttcttggacgctcggccgaggcatacgttgaacgcggggagtaacatgaagtttgagatggagtgctatgatttcgccggtaccatccggcccgatgcgaggtttgacgatacgacctcgcccttgatctaccatacctactggaggatggatctcctgccttttgatcatcgggaagggatgacgatcgactcgtttctcgcgacgcaggacctttccaggtccaaattgatactctggaccaacgatgccgacggtctctcggcgacctcgctcggggccaagtatttgagggattggccgggcgtgttcgagatccaagaggtcgacgtgcagcagatgacgcacggtaccgtgttgcaccgtacggccgcgctcgaagggatgtacgacggatccgcatgggtcgatggagatgccgttagattgctcgccctctggaatcacggtgggatctggttcgatatggacgaaatcttgacgagagacttgggaatcttgacggaacacgaatttgtcacgcagtgggactgtcgaggtgagtgagcgcaatattactgttgtccgtatcacgggaacgatgcttacacacccttacatgtatccgcgcacctgattagacgatccaaacctcatactcaatggccacatcatgcatttccatcggcaatcgccctacctgtgcgaggctttccacatcatggccaccgaagccgctcctacaccaaactcgctcgactggggagcgtttctctatcaaaaattataccgtcggctgatgcacgacggtatcaagccgttctcggtcctgccatggtgtttcaccgacccgcgaaactgtcacgacgacgtcagttttccaaatccctttgaagaggatccagtgttctggaaggggctcgactggtttgacccggctggacagggcctagtccgggacgggcgacaacacttggaaaagcgtatcgaccaaatttggagcattcatttgcataatcaatggaacaagacgttcccgcaagggggatacgtcgagaggttgttgaacaaacaggcagacgtcttggatctacgcaagaccaagagagatgccctgaacctgcatatgtagcatgtagatcgcttggactaattacaacgtgacgacctaatgacatgacaactataagatacgtctcgactaggcatcctgagcagcactaggagcggcaggcggggcggaagggccgttcagaccattcgaagcacctcgtcctcgtccggcggatcccccacgtccccgaggatgaccacgggtggggcgcacaggcggagctgcgccctcctgatgaacagggccctgaggcggcacgaccgggtgaccgttcataggtcgagcggcgaatccacctcgtcctcgtaccggtcgtaccggtccagccttaccagtcaaagcttggtgtagaatctggacctgaggggtgtttccttgcgtggctgccggagctggtcgcggtcggataccctgagcagcattgccgtactgcataggaccttggtgggcgggagggcgaggcctgaagccctgcgaggccgagctgacttgaggctggaagttttggttggccctaaagtgctgtccaggaacgatcggctgaggtccaaacttgggctggaaggcaggatctcgacccatcgccttgggtccggacgacttgttgaccgcaaactgcctcctggtaaggttgagacacgaggcaaacggaacgatggacccgcggtgttcggaacatcgaccgctcaaagtctctcctccgataaagggggaatcccaaaccacgtcaatcgacgctgcgttgagaccgataacgacacccttgagggaaaacggaacgccgccaaccgcagcgtcttgcaccatgatgaccctgtcaccgatggcaaaggtctgcccttgcaggcggtagattgcgtgcgtcggcttgagcaaagcctgccttggtacagccttaattaggaccctcttgatcttggtgagatgcctctgcgagttgaactcgtcggccgtcttttccaaagctttgacggtggtctgagggaaatcgacacccagtcagcattcgagaaatcaatgcctgtcaagcggggaagcctcaccttgtcaagctgctcagcgaagagcgaaacaggctctagatcgagaacacccctgtctttaagccactcgcgcacttgcttgacgcgggtgtctgggttgggagcgttgggaaacatatccttcgaacgagcgatcccccgatcgtgcccatccaatttctcgaacacgtccgggaattcgttcttgtattgggcacacagctcgtaagcagcctggctgaattcccagccccggtcattcttcctgctgtaaccgaggactttcaaacccttagcatcgaacttcaaactgagtccgatgttgtatttccgaccatcactggtctcgatcaagaccgtagacatgattctggacattgccagcggcgagactcccaaacccctggcgaccagtgggttggggtggtacctctcgttgggtctagaatgaaccagacgagagtatactgcaggttcgctagcctcgttggcgaagtactgcaggttataacgcaaacttaagcatacgaacttggtgacactcgttgtgctgcactcacggccagttccacggtcaaagcctcttccgtagcctctgtgacctgtgcggcagcgccgtacgcgtggtctcccaaaaacaagaccttggtccctttggggaattcagtcggcagagaaggcgcatcttgctcctgcaaatcgtgcgagatcgtcagacaacgtcgttagatcgcaaccagtcgaaaagactcactaaatagcgctcgtcttcgaaggcaacctgacggaccgccatctggatagcctgttcagtctccttttccttctcagcatagtccttgagcaaggaaccgtcatccatcctcttcaagcctgtttgcgggataacccacttcagtaagggcgacagcgtgaacgtgacttctcgactcaccttgcaaaggtctgacatgcatgatgacatcgatctgcccagtgatgacaccaaagcgcttcgagtagtggccctcgatgcgatgcgatttctttcggaagtcgatcaacgagttcggctcgtgaggcgtcgcaatgacccctcgcggacccttctcgtatcggaagagctcgtcggaaagggcaacaaccattccctcttgcaggaagggccagtacaggaaggtcctctcgccgaccatcttgcctgcgagctcggacgttttgacgttctcgaatgcgttttcgatggtaatcaccatcgagatgttcttgctgtcctgtccgtgcacgttgattgcgtgatgattgagctgcgcgtgatgaggaagcgtcttcatcgaggggaaaccagccagggccgaagcaccaaggtgaaccccgtcaatgaggccggtaatgagctcgatgccgcctccaagctcaggtagagcgtaaggctccatgcggcatttgcacttcggtagatccgggaacgagccgggaagcgatgaggtatagtggtttgaggcgctctcatcatagatgaacagcgtgctgtagtcactcaaggtatttcgcgactgctcgtcgggcgtcaagcgatggtctcgggctgcaaaatagcaagtgagcagactgccagacttatggcacctcgatgcagccgactaacctgccatggctcgaagcagtcgatcgtggtcaatgaaggggatcttgacggtcgcttcccacgattgcttctttccgttcatgtcctcttcaaagtcctcggggtaaaagtcgaggataggcgagctcgagtcgtacatgagatcctacagaatcaagacaggtaaggttgtggccggtctatgagcttttcacgaccgggactgactctgtaggcaacgggaatgtgctcggaactagcagcgggcaagacacccatcaactgctggaaaggcttgaaaggttctccttgcttgaaatcgaacttcatgtcacccaaaccgacgaaatctgacagagttgacggcgagatccaaagtcagaagaagtctaattacgactttattgacgtagactgaccggtaattcgaggagcataatggtagggatagtaccagccccaactggagcatcccttatagtagtaattcataacccactgcagcccctcgacgtatttgtagacgacctgcttaacgtccttgtcgtctttggcttcaagtttggtctgaaaaggtgacacttgagccaaacctcaggatgcccataccgtcaggactactcaccttgtagtaggtgtctttccattcattcaaacgctcgtgaagaatcgtttcgtaagacttttgcgcatcctcatcaatgttttcgataaccttggctttcctgtacttgtccaggacgcgcttgatcgcagctttgccctcggcatcatcgtcgctcgcgtcttcatcatcgctcgagctctccccatcactgacgggctcgcgctcgcttggtgcaccggaagtgtcaggagtgctcttgttggcgagcataccgggggcgatgacaacgagagcttgaccatactcgtcgacctcgtcccaaaccaagtcgacgtgcagcgcatcggcgaggtcctggatgaaagtcctatccctggccggcaggttgttaacgaactcgaccttgtcgacctctttcttgtcaaggtcgataagatcgaggacgaatctctcgaccttgtcaaacatggctcgttggttcttggtcaagaccagctttcctcgactcttggcgttttccagcgccttgatttccttgtcctgcttgcccttgaaccaattgagatccgcatattcacgttcgaagtactcgatctcggtcttggcaagctcgtccataacgagctgtactcggtcgacgtgaatcgtaccactcgagtttaggtacccacctgtcgtaaaggtccaggtcagttggattgcagactgatcactgcctggacgcaaaatttactcaccagcgaccggtaacactctcttatagatgttccaaatctcctccatggcaccctcgttgatatgcaagttgggcagatggggcaagaaatcgtttccgacaaagaccgaaagcaggatgaaatcgtcaatgatgcgttccagatcatactcgaatggcatggcctcggcaatgctcgagaactctaggtcgaggtattctcgcaaaagcgagagatgcaacaggaagaaattctgcgcgttcaatctgaaaaggcgagaacaagacaacagagtcagacaatcagactcgacttgacacgggatgcaagagaagtgggactcaccctccgctcttcttcttgttcctcccgaaagtgacttcctctcgcaagagacagaagtgagggtcgtggctgagcaaacccagcatgatcagatcggcgtcgagtccgtatagacagtgacgagtattagggttgtagtcgggctgagccttgttcaacctgatgaactcttgaatcttgtgttctccttcaccgggaacgtcatgaccgctgaagatgaccttaacgcccctccaatcagaatcttctgaaatcttcttgttgataaagtattcgaggtgtttcgaaagacgggccatgaagggggttcctgtggacagtcgaaagacggtatcagttcgaagtcccctagagatatcagaaagaggccgacgggactcacccggcgtaatacagtttgaatcgaaggccttttcttcgggcaagatttctccgttcctctgagccttttcttgagcctccttgttctccttggctgtcctaaacctcctgctcctctgctggttcatcttagctcggggtgcgcatccgtcaatggccatgaagaagacctttctcggcttgatcttggtgaacaagtggtcgatgtaggcatagatagcgaggatcatctgttcctcggtgatccggaaatgcatgtctccctcggtggaaggaggatgggaacaattgtgaatgattccattcatgtcgaggtaaagattgtcgaacgtagggatggtattcggggtgataagttgggatgtaagaggatacctctcagagatccatcggaagaatttagggatacctgcagttgatcgatcaatttcgatccgaggtggcggtgatcggtggacgacttacccatgatgcttcgttacgactgattgtttgtacgttgggagattgtgtgtctgtagcgacttgtgctaaaggtttacgactgtgcgttgaaacctgtcctgcggttcaaggtgatgaagctagcggtttgatcctgactagctcgactgctatttgttgatgggtgtggtatgaaacgacgggaaagagcgacgactcgactgttgcgagatcgaactgaagagctctttcaacttaaggattccaaaggcgaagatgaccgacttgaccggcgagtggtgttgaggcgaggactatagaaagactcgctcgtttatgacacttccccgctgggtgtttctttactttagcttaaggatgcgagatttgaattccaggtgtttcgagaaacgaaagaaaagaggcgagagcggggtcagaggttagtcgttgagatctcgatgatcgttttgatatatacaccacaacgtacaaccagagagctacagaccgtacagacctcgtccgggccctgaccgaacgatcgtggcgatggatcgttcgcttgctcgcccgctcgctgtagctgacgcgtcgataagcgcttgcgtgatcgagaccgagacgaggatcgcgctttccccgcccacccatcgccggctaagggcgtagcgaagacgactggaatcgtaccactcatcttttacattgaccggaaccgagcgagcctctagccgacgttcagcacagttcaaccccatcagtcgatctctttgccactgcttttctcgatcgtgaaggagatcgagacccgcgaaaatctgacatcaagtcaaacgggaccgatcgatctgaatgacaaccctctcgcgcatatcgatcgaatcaaaagtggtcgccactatcaccggccggttaagggtagcaagccacggcctgatctcggaaagtcgtgacggggtgatatccatctcgaccagggccacaaacaaacacttgctgttgaatacctgagtcttcctcgaggagtcgagcagtgacgctgggcggcttcagatctcgatggtcgcgagcgccttctcttgcatcaactgtcccaaccctcatgactcccgaatcgcgaccttattcaagatctagcgtaggaggcatacatccgctgttccatagctgcgtgatcattgtacaggttttaacgcttgttcgggcttcgcacatcgatataagatgtcgacgccgagcgttgtatggtcgggtgtgtccacagggggattttccccttggctgaaactcccagcgaagtccagtccggatcgatcaactacgactacgctggaatcgcttctgattagacatgacctttctgagtaattaaagttcgatattgttcgctcaagcctaacacgaggtacaaaccgtttaaatgagcgggagggatacggcgtgtagcctgacgtactcgtcctcgtgttttggaagcaattgtagtagtgtacgaagtatcgagagactgcacatgcagttataccacccgtgtttaagtctcaaagacgagcgcgattgccccatggagcgttagtcgggcatccgtgatatctcctcgacagtcgatgacgtttgcgtttccacactgctttcatctcagatcatggaagaacctcaaacttatcagtgaacacgttattgtttcccccggtctatctcacatacaagcctatagtatggtttcgtatcctccgcagtagcatctggagtcagagctttagcagttactggtcggatggtcacacccttttacgggtagaatcgagacctgctgcttcaactgaaactttgcagacagccactgggagcatgtatttctctctatctatactttgagaacgaaaggcaccgggcttgtacgattcaacgacgaaagattctcgaattaattcgcgtgatccgctgttcggattgagacatgaaacccaacgatcttcagaggaccgcccagccccccaagggtgtatttaatccgcccatgccgatctctcacgtgatcaccgagcttttcgtgacatctcccctggttcgggacgatccccggggtctgttcggaagtaaatacgaagggatctctttcccctgccttcctcgctgtgattccgatcgcggcaaggcgcaggggcgtgagagcgagcggcagaagaacaaagaagggggaacgacccacggggaagagggtggcagaggggtcaacgggtcgaggaatagggttgactccaggctggaatgggtggtgcgaagacgacagaacacgaccgccgaagaggaggggccgggtcgggagggcttttttcaattgaaccttggctccagtgcaggtcaggtgcccaggccagcggggtatgggggaggcgtaggaggaagtagatgaacgtccaggttcttgtaatgtgtatctcgggtctcggtgtccggcatgccctacatacctaaagagggaggcggtggcaatggacttgcagtagcagtaggactgccagtgctcgtgctgccgggtgaacgggggcggcctggtgtgactatcagcatgtgtctttcgggatcgttctgactacaaacagagcctttacgacgacctgcgtgctattctgcgcaaagtgtttctcgatcgcaactttacgaggtcgggtctcccgggctctaacgtcggaagtggtgtttgtcgtttgatggttctgtccttgtagcggttcttagcagagtagtgtggtacactaccgttgactcgagtctcgaccgtttgtaaccccacggagagcgagggaccgaacgaaagatcaggcgaccaggcaaagacgacgacgacgacgacgcccgaacccgatcctggacctgaacgacgcgacctgctttttccatcgaggtgcggatctgacctcgtaatcaccttaaactcgagctttgacaaggtctgccatcctccaactggcaagcagtcacaaggtatagacctatcgatttgttgctgcttgttgagctcgcggtctggcccttgatcaccttgtgccgcaacacttggccaggtggatcatttcatcaatcaaggcaggcgacaagcgacacccttcccctccccacgggtcacgcccctcacccccactataagagacagagcgtagtcagtacggggatcggggtcgagggaggtgctaccacacctgtactcaccttcgtagcaagagctctaatgtacatagactaccgaccacggcgatcacgtagctgaggatgatatacccaggcgagtacttttgtatcaactcgacgtatctgacggggacgcctcgtccttgaagtccgttccatcctttcgcgctcatctcggtaggccaggcttgtgtgggcggtgttgttccaggaaattcgccgatgaggtctgaccagaggccatcgagcaggtcgaaccataccgtctgcagactcgcggtcaggctggaggtcgacatggtggcgttggtgacatgaagtagccggtccatagagggatgttgcgtgtttgacccttgatacggtggcattcccctcctctagggaccaccgagtggtcaaagttggagtcgactcttaccgagatctcgaccaggacaaagagagaaagagatgagatgagatggcagtgatgtctttccaggaagttcgagtcgaggatgtccgaggtgtgataatctgtcggtcgttcacgaatatggtcccgtcgccgttgtcattgtcgatcagggacgagtcgggcttgatgttgcgacgagcatctcgttggtgaatcgactatgcgacgagcgacgatggtcgataggcctggttagacgatgcaaacgaggatatgatctagtatagaataaccaagcctacctacctagtacgtagtacctactctacctgaccttggtttgtaccttgtttgcgacctaaatgacccaacttgttctctcatcttgactccccctcctcctacgcctacgccttactcgcgggaaaagtgatcgagacggaagtaaatcatcgaatcggaaacaaaacagcagcagcagccaccaccacactcccccatattcatagtactcatacatggcacactctccccccgtcaaaccctcaacgacatcttgcaacacaacctccccacctcaccttctcagcatgacccggatctacttggacatcgcagtaggctctcaatccgcttacgatgccgcattcgaagaacatcgagccgtctcgacctggttgaccaagaaccacgaaacctacggactggcaggggtcatctcggagctcgatgatgtaggcagggaaactttggatagctgtttcaccggcgaaaatgtgagtaaggatacctgccaggagatccgggccggatcggacgtcctcgtcatcagactcaaactccgaggtgctcatcgggtcgttcgtctccccggctcgttctcatgcaaagtctagcctggattgaaatgcaggttagaccctccagaatcgctcatcgtcggtcgactgcatttcaacctctccagcgcgcctagtaagcaaaccacaccatacctcctctaatcttcctcgcaatgacctacgaaactcccccccacactcacacgtccctgccctcaattcacgacccccacctcagacctaacgaaacacgtcgaaaactttacgaccctctgtacgggtaacaagacgctcaaccggaacaagaagggtttgtgttaccggggaactccgatgcatcggttcgtacccggtttcgtcttgcagggaggggacgttacgcgtggggatgggagtgggggggaaagtatctgtgagtcttgtccgggtcgtcggtctctgttcgtcgatcgcaggctttggaaaaagggggcaaggcgctcatctcgaaccgctttcgtcgacctttgacctattccctcatcatctcgtctgcgtcgtgcatgatgtggggatcgaacacgcgtggtatagacggtgggacgttacctgatcctaaaccgccccattcaccccatacctacggatccatctcgtacgcctcgtcatcctcgaaaaactcgtccacctcgcaattcttcatcgtcctctcacccccggggtccgaaatgtgcaagaagaaactggacggcaagtattacccctttggcgcgctcgaggtcgaggacgagggtctcctgaagcggttggaagcgcgattgggtgaagagggtcggtggaaagagaggctgggtgagggggagacgtgttgggtggcggattgtggggtgtgttaggagtttccttgttccggtacccctgatcccgactcccgcgaggtcagcgtcgatgccatgctacattgtcgaacagaacggggtcgacccggggattacaacaagattcgatgcgaatggtaatgctagcctgtcggcgtcgtccccttaaatctccatgagtcgtttcaggaattgccacgtcgaaaacgagaatctgtaacaataccccatcgcaattcaagtcaatctcgtcatcatgacgtccaactccactcgtctctgccgttgtgactcacgctgttaggggtatcaccttgatgtacccgatgctcaacccgacgtaaaaccctcgcccgaccttgcccttgccttcatgccagatcatcctgaccgcctgccgccacgtgatcccatcgcccgtacccggtcccgcccgtatcccgccgacctgcatcctccgccgtacgacctcgaaagggtacgaagccgtctgactgaccgctcccgcgatcgcaccgcacatcaggtcggaccacgtcttgtgtcggttcaggctggggaaatacgtcgggaggtgtcgtttgagcgtcccgtacgtgaggaacgacactccggcgtagggtatcatgccgatgatggtgaccgagaaccctcggtagaacggtacgaaatggttgatgatgggtaaccgtgcagagagcatcggcgacggaaccgctggccgagtcggggcggtgagaggatggttttcccgataaatcgatctgacgacgtctgacagtgattgtcgttcggtctgatacgctaaccgtactcggatgagttcgagcgggtaggtcatgaaaacggacgtcacgcctgagtcgtgggaggtcagacaatgtcaaaacatatttccaatcagcgcccgctaggcgtccaactcacccgacagactcccagcgagaaacaacctccctggcgttctcatctctttctgaggcatcaggatctggcgtgacagcatatatgagctcgtgttacgcaaaaaggctcagagagtcacgcgaccacgcccccgatcctcaccccttccgccttgtcatacgccataaatttgactcccgcatagggaaatatccgtaacagcgtcgccaagtgtccctgaaacagtcctctcacgccctgagcggtgaggatcgctttcatagcgtgataaagtcccgtcggccggcctatggtgcggcaatgatcgtcgatgccatcagccccggaccttccaatcacaagagctctagcacgacgtgactcgcctgcgtattgcttaaagtcggcgttggacgtttgaaacaagattttcaccctgtctagcggtgctattgccgtctttgcctgtaatgtacgtagacggagctctgtgagccaatgagatcaccggtatagccggtacggacatcgagctactcacgacacatccagcaatgcctcccgccaacccactccgtagtactatgaggcccgaattcctgttcagtttgacgtacaccggtctcgcacctagttcgagactgaccataatcccagctaccccgatccgcctgagctctccgtcgactccgttcccagaatgtcaccgcttcgtcatccctggcgtatcctgaatgctctgcagcgaacgtttgtgtattatggtcgctacgagccatgtccactgcctctttacgagactgaggggtcttccttgccaacaaaatcgctgtcaaagcgttcgaacgaagtcgagaccgatctggtcaagcgaagcggggtattttacgggttgttcgtaaaagctgcttgtgatttcgccgcaacgttttggtacaaagccgtagggtatattatgcttcgaggtaatccgactatctgaggaagctgctgacttgttgatggaccttgcatcgactggatcggagacgggaaggaacacaaggctatagacgttcccctccctcaagagcggggtcaacttgtccgggtcgccgggtggaggtcgtcgcgcgtccaaggaggacctcgtcgtcatagcccccgacatcatctcgttgaccatattcatgcaaatgaccatgacatgcgagaggtttaaacaggcctttgaagtgatcaacgcccttctgtgacatccatcatccgcccgagactttcttgaaggacgatccgcatcccgtgcgcacggatttacgccagctcaggaagaagaccctcgataaaatggccgacgcaaaactcttcagtgagccagattcctttttgttgtttcgtcctggtatagacgtcctctaaccgcatcctcgatcattgcagctcggggaaaggttcaggagctccaagtcgagctccaacaggccgacaggaaggacaagtcgtatgccaagaagaagatcgctttgaaaaagatcgtcgcgaacatgacgatgggaaatgatagtcagtctcgagcagcaccctccccaaaccctgtccttctcgctgactctagggattgccggtagtgtcaccattgtttgatgacgtcgttcaatgtatgctgatccaggtgctggagatcaagaaaagtgagcgggctagaagtaccaaaggcgagtaggcgagtacagtagattctgatcaagcactggatcgatttccagtggtctacctctacctggtcaactatggcagaaccagagcggactcgatacaccacgccatctcgggcttcctctcggttggtctagccgcaccgatcgatacgggttaactttcgagattgacggctctgttgataggactgcaacgaccgaaatcctctgatcagggcactcgccatccggaccatgtcgtctatcccacttccacgcgtgatcatggccctggtcgacccgttgagaagcggacttcaagatagtgatccctacgttcgaaagacggctgctttggcgtgagtgattcatgaaaggctcattttacgatcaaggggaagcgcgctgatcgccgatgcgattgggtgtatagcgtggccaagctgtatgtgacggagccgggtaggaaagtgattgagagtgaggaattcgtagcgatgctgaggtgagtttttgaggtcatgttctgctgcgttcatccgacctgagccacagcctggtcgctgtattacagggatctgctggcggattcgaatcccacggtcgtagcgagcgcagtggctgccttggttgagatatcggaacgaagcgacgatattatgctgcgtctcaatgtcacggtagcgggaaagctcgtggccgcgcttggagagtgctcagagtgagtctcttgcctctcaatagatcgaacccgtactgagccaacgatcgcagatggggccaagtttatatcctggactcgctactatcctttgttccgaacacctcgctcgatgctgaacagctagccgagcgaatcagtatccggttgcaacatgccaatagcgccgtcgtgctgaccaccatcaaagtgttactatacctcatcaactatatggaggacgagagcttgatccggagtcttgaaaggaagatgggaccacctctgggtgagttcaatcttggtcatcttcccgaatctagctaaacatcgctttcctcgctgggattagtcacactgctgtcgtctggtcccgaggttcaatacgtggcattgcgcaatatcctcttgatcatccaacgacgcccagcaatcctggccaatgacgtccgagttttcttttgcaagtacaacgatcctatttacgtcaaaatggccaaactggagatcatgtaccgattgaccaaggaggacaatgtaaacgaggtcctcgccgagttgaaggagtaagtgttggtgaggcgatctccaaaagtgccttgctcttatcggaaatcctacttcagatatgccaacgaggtcgatgtcgactttgtgcgcaaggctgttcgatctatcggtcggctcgccatcaaaatccagaccgcggccgatctctgcatcccagtgcttatcagccttatgcggacgaagatttcttacgtcgttcaggaagccatcgtcgtgatcaaagacatcttccggcggtatcccaaccagtacgagagcgtgatcgccatcttgtgcgagaacctggattcgctggatgaacctgaagccaaggcgtccatgatctggatcatcgggcagtacgcggatcgaatcgaaaacagcgacgagctgttggacgatttcctctatacctttgccgaggagccggcggaagtgcagctggcgttgctgacagcgatcgtcaaactattcatcaagcgaccaacggtgggtcaggaactagtgcccaaggtgctcaagatggccaccgaagaggtcgacaacccggatctcagagacagggtaagatcgattaagctcgtctcgtcaggcgctcgaagttgaccggaatatgtacagggctacatgtactggcgattgttgtcatcggacccggcatcgacgagagacatcgtcttggccgataagccaccaatctcgaccgaaaccgaccggatggacaagggcatgctggatcaggtaagcatgagcccaagtttctcactctgcatcgcgatgcttaatcaccggcgtctttatccagcttctactccatactggaactctttcaagtatctatcacaagagcccgcagacctttattcgaaccgcaaaagcgcgatatcttacgggtaggtctggacgactcgatgtcggaagtgcaccggctgatgttctgccgtcggtcagactcgcccgcactcaatgcatcctcgcggagacaccttcaacagcctggtcggtctcgatcgacagtgccatcagcctcaacgtctcgaccgggcccaccagctacagcgccccggccgccgactgcattgatcgacaccaatcccgacgacgcgtattcgccgatcgacatcaattccaacgaccaatacgcccagcttgtgggagcgttgggaggtggtgggggttaccaagcggaccagcctcgaccgaaaggttcgaataggttgacgttgatggacgacgatttattggcttaggaccggccgtctcgactatggttgttctgtaaactccacaagtacaagggaatatatatatatatatatatatatcatgcccgatgggaacacggaagccttttggcatggcctggtcggcaagatcgctcggccaacaacaggtgcgaaaccctgccctgatgaagcgatccaaaagatgcaaccgcaaacacatgggatgctcgactgcgatgagtgcaatgctcaccgaccttgttcctgtattccttgctcgtcgcatcaaagcccaacattcacgtgtcaatgcgcgcaatgcgataggatttcggggtaatgtgataggtcggtcgatgaggattggtcgacattggtctcaacatctcgaccagatcacctgacctttttctgggcggtccgcagtggatcttcgcctggacctctgtccgtgctctgctgaccatgtgacaccggaccgattgatccgagacattccatcgaaagataaaggtggatcaaacggcttggcacagaacgctagacctagcgatgagccgcaatccctggctgacaaagtctgatatctcatcattctggtataggtgacctcagcaatgatacgaacagtggatggcgagttcgacacgaagagagaggattacctgctgctgtagatgcacgcaacgctccagtcaagccgtcttgccaactctcgatcgattgcagaactcgatctcggacatacggaaagttcctcatgcccgtgtttctggcctacaggtgtgcctgtaggtaagataatgtctcgctcgagtcacagcattgcctccgattacgtgcgtttcatgccctgttctccgtgtggcgcgtacgtgagcgtttcatcaaaacaggtccctctgctttccccgccgtctagtcgcgcgcgcgtgatcatccaagcgaaagagagttcgggccggaaaggagggtatctcgttgaccgaagcagagcgatcaaaacggatctggatcggcgccatcgccgaagtgatgctcaaagtcctttgacttgatgagtcccacttctcgtctcttccccagcactgtatgctcaacgatcggtgggtgagggtccaggctggatcttctggaaagatccgcctttagagatgcgaggatcaggagctcgatgatgacatgcactgggatcttggttcgctttggtgtttcgtgatctcgtcaacaacaaagcgacaaggatataagagcttggaacatctcgccggaccgagtctgaaggacgaaacggcaactttcgcctgtcgtcaccgtccgaccgtacctttacaccacgtttcgtccgttctccgagacgacgatagtcacctgataggacaaacaccgaaaccctgtgtcccatcatttgtgatttgtcccgtcgtgccctggtccttggagacgggaaaatccacccgaagtcggttattgtgtgagctagagtcgatcgaaggcacagcattttgatcttattaattgattgctcgtgctggatcgggaagaaaacctcccgtgagtttctgcaattgcacagcaaaggaaataggtcctcccagctgatgagatgtgatcgcactagtaccctgacgggaatcgcatatataacactcgacccactttgacattctccgaaatgagcgcacaacaaatacgttgatcttcattcatcaatcgttcagatcagtcgcctgcaatcgatacgggacgaacactcattcttcggcagggaccttcgacagtctcatctcgaacatcctcaatcacgcatccttgcattccaatgatcatgccataccaaagcaacgagacctatctcaacccatacgactgtcacagcccttaccagcctggtcagggattgcctcaatacgacgagaagaagatgatggatattacttgtcttcagcgattcagtgggatctacgtgagtgaacctcgtctgtatcgcatcgagcgatagtcgatgaacaccacacttttctccgccgcagtgcaacaaccttccaattggctcgtgtgcaaacatccaaatgttcaacaggcttcactgttcctacgtgagtagcatcctggctctagcatcgaagccaggagccgagactgaatcgtttccatcatcctagcattcctgcatggcggtaggtctcgcatgggcagccattccttcagcaaactaatggcgattcgacgccatccaacagatcttgaccgatggaaccccttgtcctaatcctagcgccgacggtactgcgtactgtgctaccggctgtgagtaccatcgatcttatgctcctcggttaccagagattgagtgctttttcgtcgctacagaccatgaggagaacggacgttaccctctcctgcactctccccgatccagcttctctcccagtacttccacttcctccgatggtcactcaggttacgccatgaccaactcgtacgaaaccgtctggtctcagaacagcaccgccacggacagtcgacaggccgaatcgaacgacggtcattctgtccgcagcgtctatcatactgaatctcacaaacaacagacctacctatacgactcgcagccccagcaatcgcatcagcatttcaaccactctgcccatctcgtcgctcggaatggaatacagtggagcgctcagcagtcttactctcaacctgcctcccagtactactctccgcatcagcaacaagttcccacctacggaacgacccaagagaccgaatccgagtggggtaccatcgaaaagcgctccctttaggctgggagccgcggcatcctgaatcatgatgggcaacgacgaccagcatcgctgccaacaatcgtgccgaatcgccctgccaccattcccctctcgtaaagaacgacgcttcagtcgtatccccttacgaccattcctgtatcagccaacgacaccccgctcgaagcaaacacgccgagtggcgcttgccccgcctccggcacattcccgagcggaccaccatcaagcccggtcgaaccggacgccccactttgatcgattcaactttcccttcgctcggcacgacggaagagaccttgttagacgggtttgcgagcccttgtgtttccatagaacacttctgtatctttacctcagtccgtcgggaccaccttcatatgcatacgagcagttttacgattcgatctctgtaagctaatatcgggttatgatcgggtgtggcgtatctctgaccttgaacgtcttgtgatgcgatgaagatgagatgcgctactattcgatgtgtggatacaaccgggaccctaaccagactcgcgctacagctcaggccgccaatacaaactctgcatgattcgcctgccaatccttggcacctcggtattgccacgtaaagttcttgaactcgaactggttcatcgcgtgggcctccatctccttgacgacctcgtccccagtgcctcgactggccgatcccagcccggctaatcgactttgctgttgcgtcatcgtggctcgtttgtagcgtacccggaagatctcgtcgagggcggcgggtacgtccgagggggagacgccttcgaggagagcaccgacggcttcggcgtcttcgatggcctgtgaagctccttgaccttggtgaggtagcactacgaccgccggtactgatgagagactgggcgaggggatgacgacgaagcgttcgacttactggcatgagcggcatcaccgagcaagatggcctttcccttggtccaccggttcaagggctcctgatccctcaattgccacaagccgacctcgtttgccgtcctggtttgtccagaccatccgaaaaatgaatcagctctggggtctagtggctgacgacgagcgaccggctagagactcaccccagcagtttctggtaaacgggcgcgaacgagctgtacgacttgaccagcgacgcgacgtcccccttggccgtccatttctcctctgaaatttcgttcaactcggagtcggctgcagatgtaagagtcgcttttcagtccctacactctccccttatacggccagcttgggacaaccgtgtcgatactcacgcaaaatgcagacaaagttcaagatcgtgccgttcctgcagggataacagatgatcctccttccattcccgtagatggccgtcaaattgggttcggtaatccccagcgcgttcaactcggggtcttccctgatcttgtctgctgggatgagcatccggtaggcggaatggcccgaggggaccgagttgagcgcgtcgccgacgatgctggatcggacggcggatttgataccgtcggaccctgtattgagcgacaggtatgggcaaacgggtatgttaatggctggacaaggaggccgaaaggtatgatcgtgggaggacttgccgatgatcacgtctccagtgtatacctcgcccgtgctcgtggttacggttcctgcctcgggatcctgcaagaaccacgcagaaagatcgagatgtgagctttcctggcgagtattatgactcggacgagcttgcactcacacatccggtgacttttgtgttgagtaccaattcgcaaggtttatccggcccgtcttgcttggttgccaggtctttcaattcttccaggacatcgacccggtggttcaacagctgcggaagtcgaatgcgagccatcagtcactggaaacgaatgtcgttcccatccaccagctcggggtactcacccattggttctgatcgtcatcggtcccgctaggcatggccaagatcggtgtaccatccggctggaacgccttgaacatcttgacgttgggagcaccatacttgttcaggtcaccgcctagggccttgatgatccttgtcgcgttgggtgccagatgcacagcggctacaggtacagcatgtcagcctcatgcacgcgggctttgcagaaagctactatcatctatcgatcaacgcacctccgatttccctcactaccttcactgattcgaggattgtgaccttggcgtgcgatctgagagcggcaccgcatgccatcccacagattcctcctcctacgatgatgacgtgtaattgttgtgattcggtcatggttaatggttgatgggactggtttggtcttgtcgagcagggtacttgtcaagccaacgagtcattgccccggtttcgaacgttctctagcacgaggtctaccctttttatatatcggactgtcaagaagtctcgagacgttctctaccttgacccttgcggacctatacgccgccagtccgtgcgtgcaccctacagtatgtcacgccgatctttgtcacgcccccccctcgcccgggcgggtccacggaaaccggtccatccttctttgcgcgatttgcgcgcacacaggtgttctcggtcacgtccgaatacacggccaagggctcagatgccagaggacgagaggccagaaagcccagctgcgtcccgtccgtgcatgcgtagctcatgtcaagcaggcggacggtgaacgacgagaggcatgtgaatggcagagcaaacatgatttttgctatacatgatcatgacggcaagtagactctatcaactcagcgatgcagggcgacgcgaatattcgacccccggatgtaagcgacgatcggcgatcggtttgattctccggactggaagcatctgaccggagattcaggcatacgattgcggatctagagcgaaacaagtcgaatataaacagcaggtcgcgaagcgtgtcgagtatggtctcgagcaaggtagattcggttcatcacctcgttcaacctgtctctctttcgtactctacgccgtctgtccactatgccttcccctggaaaaatcgcctaccggcctatcaaccccccgactgtcggccggaacggttggacgggtcacaaccctcacacgtcccaactcaagaagggtgacaagcctttcgggtaccgccaggtggattgcgatatcaccatcgagcatgacgtcgaggtcgtcgtcagggatggggccaagctctatgtcgatgtctatcgaccgaccaacgccaagggtaagatccctgccatcttgagctactcgcctttcgggaaaaagtactcgggcatgttgatgtgagtttgagacgcgaaagtgcacacgatcgatcgagtagatccttactcgttgacattcgacaggcttccgatgactccctacaaatgcggtgtgaccggcgaagacatttcgggtctcgagaaattcgaaggtgggcttctctctttcagtcgaccctcgaccgcgatcgatactgacgactcgcgacccgccccgtgacgaaacaggcattgaccctgccaaatggtgcgcctggaactatgccgtcatcagcgtcgacgcacgaggagcaggcgcttcggatggcaacgtcgcgatcatgggaactcaggagggggaggacgggtacgacgtcatcgaggccgtcgccaagatggattggtgtgatgggaacgtggcattggcgggaaacagtcatctagccatcgtacaatggttcattgctgctcagaacccgccgagcttgaaggccatcgccccatgggagggttgttcggatttatacgtgagtaacgcgatctcaagaagactccctgcctcttagactgaccgaatgcgctttaccactactatagcgagagcagttcaatcggggtggaatccacaacatgtcgaactttgagctcatcatgaaactcatcattcaaggaaatggcggggtcgaagatttccgtgaaatgcacaagcgattggaccatggaatcatggacgaatggtgggcggacaagcgcgcgcagatggacaagatcaagattcctacctacatcaccggctcagagtttagctcgatccataccatgggctccttgaggggttacatggagattgccaccgaggacaagtggttgcgatgggcgggattccaggagtggttcgacctgtgggcgatcgaggaaaccaacctcgagttgaaggagttctttgatttcttcctcaaggtcagtaccagacccctcgaccaaagatctcgaccccccgctgatactgtggattctcgctgtgcagggcgagcacaacggatggagggaaaagacccccaaggttcgaatgtcgcttctgaactacggaaaagacgagcccatccaaaagatcaaggtcccggactttcctattccggacaccgactatcgcaagtactacctcgccgacgacaagaagctcgtcctgggcagtgcgcccgaggaagcctcgtccgtctcatacaactccgaggacggcagtatggccacctttacctacacgttcgacgaggctacgcagctttgcggactacccaaggccgtggtcaacgtttcgtgcgacgcattggacgacatgtgcttgttcctgcaactacggaaattggacgtcaacggcgagccgttgattcacctgacgatccccttctcccgcgcggctatcgacaaccccaaggacgcgccttcaaatggtctcatcgtctataacggacccatcggttgtcttcgagcttcgcaccgtcacatcgatcctagcaagtcgatccacccgaactacccattccatacccacgaccgatacgaacccgttcctcgaggcgaaatcatcgagctcgaaatcgggatctggttcatgggtcttcagtacgaaaagggccagtctatccgtctcgatatttcgggatcgaaccctctttggccggaactgtcgactagcaatgcggaccccatcaacaagggccagcataccgtacatttcggtggcaagtatgctagccatttgatccttccgcacgtcgccctcgatgtcactggtgcctaaaaagacagcacacgagagcttgtatcagatcagagaatgacactactatagatcacgtcacggcagaaagtctcaggctccatgctttgcgatgccaaccttttttttgcacgagcctatcagggacgaggaatctgaactacatgtgacgccgtccgaggtttccgaatccctgtcaaccgaaaagcttccgaacccaattgctaccggtcgatcggtcgacgactaaccgcaactttcaacttcacgtcctgcttcatcacctgatcgggtggagtgtctagaacattcaactgtatgcaccgaacaagttgtgaagaactcctccatacgaaacagcaagtatcagtatggacgaaggagaaacgtacgacaaagcagatggcagctcagagagcagggagccgatttcgctctcggtaggtttacattgttcgattacttgtccgggaaaaaggagctcagagggacctctctgaccatatacacgatgcagacataccccaaatttgcgtataccgaatccgcccaagacaagggagatcgtaaatacaggactgtgcaggcatgtaccggtaagctgctcctctgattggtccggcatcgtagccgaagaattgaccgtctttccgactaccagaatgccgacgacggaaatccaaagcgagtcttatcgtctaccctgtgacacctggagctgagagactgatatagtgttgcaaatctctcgggataccctgccgtcacctttctattctgacaagttctgtagtgtaagccgtcgcggaaaattcccggatggttctcagctgatatcagacagcgatgatgatataggcgaccgcacatttccatgcgggcaatgcatagctcgcgatgaagcggcgatttgccgggaataccaaaaggatcgagctgcgggctacatgtgagtttgcgtgcgtgacgtaaaaactcaaggcaacctcgctgatgactcccacacagcggttatgcccacctgtccgatttcgacttgctcgtccggcgtgcagcggagatggaagatttgctggtccagcatgatcgcgagctcaaacggctacggcgtcatttggaactgcgccagactgtgcagtcctcttcagcagacgcggccgtctcggagcgactggagtcgattccgaatgagcaggagaatctatccaactggtccaatgtcgaagatccgttcactcacggcacgtcaagaactactaccacatctcaacaagaggcaaacgaaacgaatgcgtccaagagacgtcgagtcgtcttccgaagcccgtccatcccgccacctcaggagtctgctttctcaggcacgaacaaggagcagcttggcggtgccggaccctccgggagcaacatgcgaccattcatccatcatagcaggcctccaagcgaagcgccgtctctggcggatcacaacgccgcattagtcctcgaggcaagtggatctaccggtgggttggtctgaatgctgtactgatcgaggcgtgatctctgctcgtcaggacatggcattgaatcgagtcggaaatttggaaagagagacaatgcccatgatgagcggcggacgcaacgaagacggtcaacaacaagtcggaggaagtggcaaggagagtggcgtccccatcaccgttcctcaagccgatatgttgccagatcctctcagcaggcgatttatcgtcgactatttcgtcagtctgtgctttcgagtctgagcttggctaaacgcgctaaacgtctataagaaattgcttcagatgaacaagtcagtacatacagacctccacccaataacacaaggtcagagagctaataccgttctgactacagtatcgaatggctgtgagactggcgtgcaattagctacgcgagtggtctactgatgggctcgttttcgaaaggcatcgatgcctgcatcgtcccactttccagcaacggttcaacgcgatgaacgataccaacttctctgggccgctgaatgtgccttctgcactatttctggctcttctggcggcgataatgtgttcagcgctgcacggcatggattcggaatcgctcgaagtgctcggctacagtgaggataccaggagagcgatggccaagaccatggccgagttatcggaaaacgctttgtacactgcggactggttgcaaaatcatcggctcgagtctctacaggcttttctgtgagtcgaggttgctgagaaggcgtagattatctgaccattcgcccgactttacattacggcgtcagcattctcgggccatacatgaactctgtcagtcgctcagaagcacattgggcgatgcttggctcggctgttcaggtaagcattgagtagataaaggaagactcgaacgaaccgtgtttaaacatgtctcgttgtgctggaattatcaggtagcgcacagtctgagtctgtctcgactcgggacggagcttcctgctgatgcatcacctgcgcaagttcaacgtcaattcggtcgaagatggttgctagcaagcgagcgtgaaactggccggagggtctggtatgctctcgtaaatcccgcagttactgagtcgtacctgacaatgatactgacgcaaatgactccggcatctttttcaagatggaaatttcgtttacgagcgcttcagaccatcatttcgcatgcatcacgccgttggatcaacaactatgtgtgtgtcccgccaatgtagacgatgaagcacttcaagggcacggtcccatacattcacagccggacgatacccatactgtgagtcctcgcttcgccggaatgaggtgcttcgctaatgcggtaccaacagagcatgtcctttatcttgaaccgcatatcgctcatgtatccaagtcaagaattagtctcacgtacattgacagcgaagggattgcaatataatgcaattgaactgtgagttccaggacagatccttcacacagaacaatgcttatctttgggacgagatgacgcacagggcacatcgaggtttgcttgcggctgcaaatgcattttcgcccttttatctctccactgctaggctacaggactgggcaggagacgcacaagagctttcgagactgcaagtcgaatggaccccttgatattcaacactgctaatcctttcttcgctacacagtacagcagagcgttatatattgcaatgcgaagtcaggcttcggctactgcgaacccatcgaatatatctacccggttcacttatgacaaggtgggctctgaggcggatcttgaaccggcatcaatatcgcagctgaacgtcaccctgtgtacagcaattacgctttgtctaggaaagtctgtgaagaacaagcctccctcgctctcgcaaacatagacgtgctgccgaattcgataccgcgaacatactggtacgcagtccaacttcggaaccagatcgctaaacatatggctgacgaggtgcattgtccaggcctctctcgcaggccatccttactgcaactatcgcgctgttttgcatctatttccagtctgccgatagcgaggttgctggcaatacaagtcttatgcggagcggaatcgactggttgaagtaggtcgcgttcacggctatgatgtcaatttcgcgattgacggggtcgcctccgcaggaacaacacgatatccgcagccctacagcgctcggcctgtacgttgcaatctatgttaggtgagtaatcgcatcgcctcgtggttgttgacggtgccctccttatgctctgggtcttacgtccgctagaggaagaggctgccgtccggtacgaaaagcgtagcgagtctgtggcaagccgcggcatcaagagaagcgcagggggacacgaacttaaaggggaatcgaagatgcacaggttgcttagaaaaatcatggtgaggcatttgggatcaactcaacctgattatctggttgattcgttcgcatccagacgccggcacacatggagtcgaggtattcagacgagtctcctgatgctgctccgaatacgggcggattgcaaccccctcctacccaggctgcactggcactggaggagtcactatttgcgaacttcggtacttacgatttctgggacggtattgtggacgacagtggtttcttgccggataacgtgaataattggcagaccgcaaacccaacacaggcggatgcgatcaatccggacattctcggcttcttgggtatcgatctcccgcctcatggtcaatctcaagattggttcctgccctaggtaggtaggaagtcacacgtcgtccgatctgatgtgatgtgaattgtgccacatttgtacactggaacatacaacttgctataaaaagcatatattccaggctagcatttgctctctttagggccgtcttcgtgtttcgcattcaggggagcgtctttgcggagaggcaggatatgtggcgatcagtgatcacgtcttgaagtgtacacatagaccaacgaagacgtaccgacgacccagttcattcggctcttggggtttttgaagcacgcggttgcgccagccgcgatgacagctgggtaacccaaaggtgagctcagtgtcaagcattgacgcagcaggaatgaaacgtactggctggcagaaaagcgaaccaggtgattttgaaggcatatgcttgcgcagaagccaatccccccatagctgccccgagaatctgaggcgtgatacctggtatcgacgacgtcggtccatgcgaaagcaacgcgccgatcaaggagccaagattgctagggctgaatccgaggggaattacggcagatgctgtagagggttggaaacctgttagatggatcattcatctcgggtgacctgtttactcaccgatcgagcccgggatcttctcggccgagatattgttgtatatgacctcggcgatggcgtacccgacggtaccgcccaaagtcctggccgaaatagtcaaagccgaagcgactccgataaaaaggggaggggtagatagctggaccatcgtcatgaccatgacaagaggggcgacaaaaccgacaccagccaaagcattgctggagaaatcaagagggtgagcaccccatcggggcaatacgaaaaagccagacttacaatgtcaagcccagcttcccattggtgccgctcatagcgaacccgatgatagcgaccgtgaaaaagcaaaagccagcgcaaatgggccatttgatgtctgacctccgagtgacatctgcgcaaggggcaatcagtcagtatcggttcatcgttttgagtctaagtaatgctcacaaagcgacaagaacggcgacagagccgtgcagaccatgaagaaaggcagaaggtagcccccagccgtaagtccaccagcaggcacccaaatggagtatacttgcgaaggctgcgcaagacgtaatcaagtcaatgactgactagccgtcgtggaggtcacccgtacttacgtaaatgttattgatgaggtaaaagagcgaaccttcgacagcgattacgaaaatggcaatgggaaaattgcgtccatcctggaagagcgagtgatgcaggaatccaaccttggtccccttccattctgtacgagggattttgattcgttagctgacaatgtaaccgcgagtgagcaggattcgacttgccatagaggaggcagatgatgaaactggcgcttccagcggcgacacagccataagcatgggggtccttccagccatagttaccttcagatgcagtgtggcgagattagcagtcggtcctgaatatcttacgcaatttgacacctacggtcagaagcccaagcgaaacccatgagcatgggcactagtcctcccaacaagaacaagtagccaatctatacgaccgatagctcgtgaggttcgaattgcacggtcctctagtctagcgtgcaggcttacccagtcgagtcgcttgaatctctccttgacggggacatgttcttccgtccttggaggaggctacaaattgggccattcctgatcaacaggtattgcggtgataccgggatgatcagcactcactcggtaaatgatggcgaagccgataaagatgatcgcgcttaggacaagttgagtcctaaagatccacctccaaccgttgatcggatcattggccgtggcaccagccattcctaagagggcagggatcgaggaaagtccggccagactgagaggatggagcgaatgtcagtcttgttaacaccacttcatcgtatgatccggctgagacctaccagttgacagcggtctgcgcatgcgatcggtatctgctaggcacaacctccgaggccgtggcatacatgatacccgaaacacctgccgcacatcccgacaacgtctgagccaagatgaggacggtcatcttacaagatgaaaagtatgagtttcgatcactggtattctagggtcatggcaaggtgagcttacagagtttgcggtcatggccatgatactagagacgcaaaagagaccccaagcgccgagtacactaaaagacaatggagatcttttagccagtcctcagtaccggtcgtgagcgagaccctgtactcacatccactttcgtccataaaggtcagaaaagatcgagatgatgggtcccgtcacgatcgaagggatgccttgctaccaagcatccatagccattagctgccgtaatacggagcggctcgagtccgaacagggcttaccgactggacgatccagattcgcttgtccataccgttgagagcgccggcgatcgagtaagagttagcagcaggggcgatactaaaagagagacgttcacaagacacaatgtcagaacgggatactaggaacgataggttgaagctcgctcacccaaagaaagtgttctggaattgggctagagcacagaggaatacgattgcccaggcggtccaagggatatccggccgttgcgcagggtcctggcccatggtatccaagacggtgactgggccggtcttgccatcctcggcgtacgatttagtgtacccagtatggttcaccgcatcttcgatatgcgtcgattcgagctttttatcggggtcaccttcgtaggtggaagaaggcatcttatagagccgatgttcgggggtgtccgggctggtaagttaggaaatgtcggggaaaggttccgtgtcagcgatatgatcgggctaagcttgtcaagaccggggagcacattcaacctacttcgatgcatctcctctattacagtgccccctatatcccatattcttcgaccttgatcccgcctggacttcagcgttcagtcacggtttcgtgactacagtatacggggcagaccgagttacttcgaaacgtctcgccaagcagcgcatctacggtctatgcattgcgaacgggtccgtcggctcctccggtggattgtgtgtggattcgacggatgtctgttcttctcaaggtgatctttccatcttgataggcgggtggtgaaaagaaacggccggacggcttccggcggcggcgggcttcattcgccgggaccgtctcgattcgatttcctcgggttgtgcgaactttggccagcacccacctgagtacgggtcagctgtgtcggagatgcaagtcgaatctaccaggctataagatcaagctggtaggtacataagagttcgatctgacgtcaagggagtcgttagtagtaattggctgctgtccaagaaagctcacaacccatccatcgactacgacgcgctcgctcgtttacgtaaatcccacctctcccggcatcaatcgatcaaaagccatcgacagataacttcgaaacaaacatgggcgttatcactcgacctcccgtctctgtcgttcgagatatcaaggcagagcacgctctcgactttgataccacttacaacgactggagggatgatctcattcgagacggatacgccgtcatcaagggagccattccccaagagcgcgcggaacaatacgtcgaccaggttcacgactttctcgagtcggtgtaagtcgccgtgaaagaatcgcttacgagcaatgtcgcttacccgaactgccttgtcgatagcaacctggggtacgaccgcaatgacccttccaccgtcaaggaagagaggcttcctgtgatctccgagaagggcagtgagtaacgtttctcaacgcgagaagactgcgccgatctgacattcccatcgtcgcaacatcacagtgatccagcactacggagtctgccatgaaaactttgtctggcagattcgtcaagagcctggcgtctacggtgcctttgagcaagtctacggaacggaagatttgatcgtcagctttgacgcgatcaatgtctcttttcctaagtacgtatgcctaaatcccaaccgagtcctcccttttgctcattcgaaacacaaaacgctctaacagccgcaaagatctccctcccaacacaaagtggtcgcatcaagaccaagaccccgatcgtcccggcttcaggtgcttgcaaggcctcgtcaacttgcttcctaacggcccgaacgacggcgggctcatcatagccaagggtggtcaccttctcagcgaagaatttcacagggaattcgccgaagagaccaggatttggcagtggaccaacgagtggtacggatttaccgagaaaggcaacgaatggctcaacaacaaggggctcgaatgggtcaaggtcgaagctgggcctggggatctcatcgtctgggactcgaggacgcctcattacaactgctccccgactggggatcgagcgaggatggccgtctactgctgttatatgcctgtggctagcgcgacgcaggaagaattgcagttcaagaaacaagcattcgagagtgagccttgatcgttactgatattctgtcagtgctcggactcaagctgatggcgatttgtcatctatttcgcgccggttcagatgtcaagggaaccactcactggccccaagctctgcaactctttgtactgccctgcttgcgagacggtcagccggacccccataaccgacccagaccatcgagggaaccgagtttcaccgagcgtggctggaagttgaccggcatcccttacatttcttcctccgcttagagcggtctgtcctgttagactggcagagtattgtatcaggcagcttgatctttgttcgctgtctccgtgaggttcctgttcttcaacaaatatatatatattgcatacggctgttcagcagccaccaaatttcgctccaaccggttccgagtgaaggcttccgctgcagctacatcatcctttgccgtgcaattccaagcctcaccatgcccgatatatacctatccctcgaacatcgagatctatctcagtgtgagccaattccagactactattcgtaaggagatctggtgccgtttagtggtatgtgtggcgtctttcactcggttcacctctcgtatcttgtaccgtttgtcgcttcccttcgtccgggagtcctcctgaccttgaacccgaatctgatcctggtcctgcctcaacaatcttggttcttatcgtccacgatggctgcgccccttctctaatccccgtcgctaaaccacacttcttgccctcatctctaagagctcgattcgatcggtgaggcctcgccgcagagaatgtgacggctagacttttggtatgagacggacgcggcgtcttttgtgagaagattcccgcgcaagcatgcgagatgatttggcactatatcaagttattgcatcatgctgccaaatgttacgtggcagggatgggatcccgactcaaatggttcacttgggcgcgtgatgatgacatgcttgactacaaaatctcatgtttcccagcgacagttctggatcctatgatatatattatgctatcgtctgcatatgtattctacaactttgcacaccatctaccgcctcaagacccttgcacttttccacttacggaaacgaggcatgtaaaagtacaagggaatcgccaaaagcagccaaccggcagcgcagccggccaagataccaccagcgtaggcgtttctaccagtgttggcaagatcggtgatagctgtggcgagtccgaacgacaagatgttcttgcctccaacgaccatgaccagcgcggcaccggcatgatgtgtcatgctttcgacacagctgcattgagggacgggtcagctgagctgagcggaggcaagatatgtaagaaatcacttactatgtagtcgtggtgatcaagatacagataaagaggtaggtcgacatattcaagctgaacacgatggcaaaccagtgcaccgagggagctgcgtccgcgcagaagccatacatcaaaacacaagcgataccgatgatgctaggaacgatgatggcaggaagctggacagtagatccacatgtgaggattgagcgagttgcgtgtgatgcagaacgagataatatcccgactcactcgatgttcgggaagatgttcgcccccattacgcttggcgaaccacaagttgatcttgtctccaccccatccactggtcaagaaagccaggagggagatcggaatagtgccgaggtagatcaggccggtattttgatgtgcccatgagtacttctcttgcaggattgttccgaaggtcaaggactggccgatgctgacacctagtacgatggcagaagcacctagcgaccagataatcgcgggatccagcaaagccagagccatgtgtttgtagaccgtcagaatcgacctaaagtcgctccaggtaggagggaaccgataaaggagcgactccaagtatcccatattctctatcgcaccttgtccctgtgtttcgtttgcatcgagagacacattggcagcctcgtcgtcggtgagcatgatgagattaccaaatgcgtccactttggtggctttcccatcgatagcaaaagcaggtcgatcgtacttggtctcaggagcagcaaacacgaccaagagcgttccaatgactgaaaggatagtaaagatcttaaagacatcatccaaatcagaccagatatcggatcggacgaagatttctgcaactgacccagtagtaccaagcccacgccagatactctgcgatataagaactcgcagtgtttaggcaagcggtgaacagactttgaaactttgatcggcgttcaaggtcagccagctgtgcagctgtcaatgccgtgtcgaatcagactcaccacccagtaagcgccaaagtacttggagcgttcgtgtacaaaggtcatgtcggtaatgatcaggggtagaagactctcggtcgctccggcgctgaacccttgtaggagacgtgcacccaggtggtgctcgtagctagtgccgctcttggctgcccatatggaggaacccacaagcatgagggcagcaaggaagaagatcggacggctagaggcagagattgcatgctgtcagcatgcaccgtagccttttcgcatttgtaccgggtacgaaccggccaacgaccagagcgagaggtaagaacacaaagttgcccaacccggtgaacaatgaaggccatgtcaaaagccgcaccacatgatccggagttatcccctctgttttcagaagtgtaggaatgatcaggagggaggctgcgaggcgaccatgttggccagcttacgaggtatatatagaccaaagaaaattggtgctaaagcaccaaagcctccgacaacgctcaacgcaatgatggcgaaccaaatgatggtaagcagaagtcccagcttgcgggctttggaataattaagcgggtcgtgcttatttccactgcgacacaaagccgaagatcaatgggtgcgattgacgctcaaaaggcgaacgttcgacttgcgtaggagtagggatgagccgaatctggccgcgttcgtcgatcaactggacattgccctcgatttgagggatttctggctgatcaggtttagtgaactcctggtgctcctgctcaaagttcttgtcgtcattttcaaacttggacatggtgggtacttgaagttctgctgatacatagtaccctgaggcccacttgttccaggggtatgactgatgcgcacacgtcgttttatagagccaccttcgtgtaatgacccggaggatcggacacttaggtccgcgattctattgcaatcccagcatccaagtcaagtcatccggcgatgaggcagtgatcgctgatcgctttgcttgaggatcttctatcccgttgtcctggcctcgatcaggccggtttcagcattacggaaagcgttgccgtcggaacggcgatgattccgcccatttctccataagccaaaataccatgggagcggagtgcttggtcgtccacctttatcgtcctgattctcgggttggatcgctgggagcaatctcgcggaaatagcatgcggatggcccatacagtcgtcggataatcacttgagtggcaagtaggtgaccctagatcaggtcgaccccgcgtcccccacgtcgatgattggtctcggaagcttcatctctaatttcggaagctcatcaccagacctgacttcgagacaaattaaaattaatcaattagacgtattagaccaataccactcttcaagtcgatgagaggtcagagatcagagatcgacaaaaggcgacaacgttaccggctgtgacactgacacaaagagaacatggaactggtatacactgcgacgccacaacaagtcgtcttcgtgatttgctccatgagaagagcaagaaggcagctatttccgcgaccagcgtcagcacgaattcccagagcaagagctggtgatgccttgatatgcagagtatttattagagctcgagcaagatgacggcgagcctatcagagagatcctctgataacactctgactagccgcgactagtgacgagtcgggttactggaattactacaggcctagccataataacaaaagctgctgcattcggcttctgggattcacaattcgtctccaaattgaaaaacggcatgatctaagagagttaatatgtacaggtcgaggcagtatcctcagtgatcagtgatcagtgtacatctatagaagggctaaaaatacgatattccggtgacaacgtttgccctgtgtgccggaaagagccgctcggctgacctcaagctttcggctcacccatccagaacgaccttattcgactgtaaatctccgcgtgactccaacctgagaacgcgatcttcgagccagtcgtggccggagaaacgatcaccgcatcgtccggcacgcacagtcgtgtggctgtggacggctcgaggtagaacaggtcaccatgcctgggaaagacgcgaggcaagtgtttattgtcagttagaagtgattctaagcggaccgtgcagtgctccgatccttgctcacctgacgccctgctcccccaaagtcttgccgttctctaccgagctcaacagattgatcttgtctacgtccccatgccgccgtaacaccaaggatcgacctttgaccagatcgccgctattgtgtgttcgaagctagagtagcagaaaatgtcaggctgcaatcgctttcacctcaacgccgagctataggggtattcaccacttgattccatctcgtgtcgtcctgcacctcgatacggatcaggccttgtggtgtgcgtatacgaacgatcatcgtggtctgctgacagctccgactcgaaactggatcgatacgagaggcgggccataatctctcaggacgatcgtgggctatataatcggctaagtaggccaacagcgtgacaggcagggtgcccggcgacccgggtccgaggtcaccgtgaacaggcaccgcgtgagcaggtgtcccacctcagactccaccacgcaacgctcttttcctgcgaatcggctaccccttacccaatccaggttcggtcatcttgccatttctttgatcgagagttagtccggaacagatccgataatctgctcgattgtcggtccttacgatatcacgatggaaagccgtgacaatttggatccagcgggaggtccaccgaccctgctaggggtaagtccggcttgacatccgtatacttacatgaaatactcatcggtctgccctcaacatttatttaggactttccgtctttcagctatgtggatcagttggagaacaagcaagagagaaggaaccggacggtacagagttgtacaggtcagtctcggtgccgagcaagaacatactctttcccccgtcggccctgaccaatcacgatcgatgacaatggatttgaattgcgcttgtagagtgccgaaggcgaaagacgaaatgtgatcggtaagactcaaagaccttcacgtgcaatcaatcagtggctcataaggataactcatgtgcttccgaactcagagtattcccctgcggtccgtgcaagactaggggatccttggcaagagacgcctgcgtcgaatatcagaaacctttacctgagggtttgacgtgagcagagcagaaccgtaaaattccttgattgttcctaaagtaatcccctatggcttcgtcattagtggatatactcatcttcgcgactttgacactctggtatcgagagtttacgagttagagtgtctcgtcagtgccatgttcagaggagaacacttgccatcatccgaaggcgcctctgcttcggtagcgattggatcgagagcagtacggttcgctcccgatgcttcagtcgaaccaaacaatgaagggtcgaaatatgccacaagaagagaatcgttctatgacgaccacgcaggggatgacggtttcggcgacgacacgacaaacggaccatcgacctggaatgacacgaggcaagcgggcccccggaaccctggaaacctagggtttcagacgactgaggatttggtccggccgaccctttccaggcaaaataccaacagcagtactacgccgaacctcaccgccgcgaatcactcctttgcctcgcacccgcttccgccatccaacatttccccgccgttcagcatgaactggaatcaaacatcatctggtttaagaccttcagatttggctggtccttccactcagcacagcgaaccggcgagcaaagcacccagcttgactgaacacgacgccgctctactattggaggatatggtttatgatcgcaaggtgatgcgtgacggcaataccggtctagcaggtgagctttcaattctgctcagaggaggtcgcggtcgactgatggccaattcggctcggcggacacaggcatgtcaagcgacacgcggtcgacgcccttggagttgcctcaagatttgacccctgcttcatgcggtggtcagtcaaccggtaacgagtcgttccagattcccggacttgatcggctgccgcctctcgctctcgctcagtatctcttgaaccatttcgtacgtccagttcgatcgcccttctaacgcaatcaggcttctctgacactcgacgctcacaggtaaatcagtaagcataccgaggctcgaatgacaatgctgccgaatcgtttctcctgacttctatgcctatacttttgccagtacggagtggatgtgagtctatgctggaaaggccgctgacgcattcgcacagcttatcgccacgccaatccatttgcagatttcgctgccttcacatccccacattcactcgccaattagaggattttcatcgaaactacccaacgacgagtggggttgcgtcggctcaagcggcatttcttccactttacaccgcttgtctatgcgcttcgctgcatctcatgacagacgaggttctgcgaaacacggggtacaaccaaatggaacggaccgcagcactgtcagattggaatgagatcctggagctatcattggtaaagacagactgggcaggctcgcctagattggaatcgttgcaagctttcatgtaaattgcaaggttgagtcaaggacaaccgaaagctagtatagtcgagctaaggtcatctttttttccactcacttttacagtattattggcccctattggtcatcggtgaaccgttccgaatcacatctggctcaactgggcacagcgatcaaggtagcgatgaacatggggctttcgcgacttgggccagaactggcagcggaggcaagctttatccaaatcacacagcatttcggacggagatggagtgccgcaagtgatcgtgaagttggccgtcggatctggtgggctttagtgagagctatcttcgcgcatcaattgattccatgagctaaataatgaccggacggtcttgtaaggtcgagctagattggctcgccagcctggagcaccgcttcgaccacgtcgcgtccatcgacctcgccacctgcgctcaaccggccaacatctcggacgaggcgcttgtgggccacgggcccatccgtccagaacccatgtcgatccacagcgtgagtatagctgagcttgaaagagatcgcgcttctgacaatgctgtcatatctgccagaatatgagcttcttcctcaatcgcattgcgttcctctatcccattcgaagcttcgtcaagagcgttcttgaagcgggtaaactaagctacgacctgatcattaggtgagctataggcttgcgcgagtcgagagctgcatacggttctgatgtacctccgatggcgtttcagtactcaagaagggtttcagaacgtgatcgagcaactttcccctttctatcgactgaacgcagccttcgatatggacctcacgcaatgggcttcggatgccgctacattgcaacggttgagcgtggagaaattgctcatcaatacccacggacattttcagatacttcgattgcaccgcttctacctcaacatggcatatcgatctcagtgagtgaaggaatcaggtctaagagatcgtttgggagttgacaggtttgctcgcagtaagtacgccttttcgaaagatgccactttgcagtctgctcgatttttgctcgggacggatctctcagcgtcgcccgcaaataacttgctccgctactggtacgttgcctctttctccaatggggaagtcattatccatcagcgcctgatgaaattcgcatgtctccaggccactcgctaatagcatgttgtcggctacgatcgtgattctgatgaatttgtgtcatgcggggcgtttcgaggtcaatgacctttctcttttagtgcgacggggcatcgcatctctgcggtaggctgtgcgtactgctgaaccattaggtaaatggctgaatttgctgttcttcttgatgaacagatgtcttcaggggtcaaccgctacctcgcgctcggcagatttactacaaaggctttatggtcagcagcctttcagacttttaaattgatgcgtggaaactctgacatgacgtgttcgcatcagatgccgaaatgcgtagcaaaaaagactctgacgacaaggaggtgttcaaagattatgcgttgggcaaacgaaagcgtggctcgaatgaggattccggcagattcggaggacttttgaaaagagtactggtaagccatcatgactcatgtccaggcctaagcttgcgatactgattcagatgtcattatcaggcgaatcctcagactttcgacaagcccgagctagctacccgcacaagcggcgactttaatagtcacatcaatttcgactttagctcgatgcctacaggtggaggaacaatcccaggggaccaaacgtattcgttcgatgctattcctggagactctgacgtcttgcaagaggacagtaatgggctggaaaacttcgactggtcgacaatcttgatgggggagtccggaggacaggacgatttcttggaactcctcaagtggactatccctgagtttggtgacaatagtgctggcataccgtcatgaaagtaatgcctcttttgatttggactgcgatcgacgagatataacataatatgataacttgaatgatctacattgttgaatactctaccagactggcgttacagatttgagggcaagggcttcccgtccacgacgactggctccgctgcgatcaagacgaacatcatcctggcccacttgtcggtcttgttgttccattgatggatactgagtagaggccttcagattagctaagtagcgattgcaggtctactaaatcttcgatcagactcacgttcccctttggaccaccacgtcggattgcgtcatgtgtcttgtctcgccattgtctagaacgagctcgagatcgccaaagatgactacgcctgtgggtggtgcgatagtcgtgagtaacgatgaccacacagaaagatgctcagcatttcctggacttaccgtagtcgaggctgtgggtcctgtgcatcggactgaaggtgttgggtggaaaatcgacgtatcgacatacgattccgttctcgcgcgccagtgagccgccgggcttggttaccgcccggtcttcggtatcagatacagttactgggagcccctcagtagtccacgggacgtgaaagacagcacactcctcctccgacttgtggaactgtgtgtggggaatgtcgccctcgagtgaaaagattgcattgccttgttcatcgtgcgcagtgacgaatcgcctggggtgagggggagcttgtgacaagattccggtcgcggcggtcgtcatgctatgggttggtcttgttaaggtgctagggaggggaaatgtgactactgtcctggcaggcttgtcgactatgagatgccaccgattacggaccgaaacgctcttatatcaagcaagattcttgcggtgcgcgcttcggaaactcggattcggaggagccggtttgatccgcgacaaggtgagattacaacggcgattgtcacgtgagattacggagcgcccgggaaagcgtgaacttgggcggacgcgtccagtccgtgcgccgttgaggaattggtctatatgtcgaagggaagataccgaccgatattggcccgcccttgccgctggcctcagatgggcaattatcgcaccacgcaagaccgaggactacgatagcaatcaaaatggcctccaagcaagatttcaagacactgaaccgcgctgccttggatgcggagggagcctttgttgatggccgactcaagaatatagccttcaagcacaagcaattgcgggcattatttcgtgagcgaaagcagactgcgaccgtgcggccacccggttgactgatctagaatcgataaccgccaggcatcttgcaagacaatggcgatgcactgttgaacggaacatcatcctcgggtcggctcgcactcgagcttgagcactgcctgaaagtgatctcggagacgatcaaggaattaccgtccgatttggtcaaagctgcaaaggcattgcgtgcacttgtagatgcaaaagcttcgcaaggacgtcgtgcatgcggatcgggaaccgtgttgatcgtcaccaatgatgctcgtgagtcgagctgagccgagttcgagtgttgctcgaccgagtccattgacctgatccccgcggcagatccaatcgccagctgggttatacctcttgtgactgcgatttatgatggtaacgctgccgtcgtcacggtaagccatctcatcgatagcggtcatgcacgaacaacctgatctgatctgatctgatctgtctctctcctctcgtctgcttgacagttctcgcctgaaagctctaggacgttcaacacgctccgacgaccccttcatcttgccctcgaccaatcgagctttcatttcctggagcaggacccttccagcttgagcgcatggatcaagtccgcacctccagctttgaccggtgtcgtctgcctcggcggtctacaaggcggcgacgaggccgccatcgctgttcgagactttaccgtccacgctcccgctcgtggtcacaacccggtcatcgtggaccaatctgtattgccttcgggttcattgcaggagatggctcgaactcgggatcccgaccatgttcctcatgcgatccaggatattgccgcctcgatcgctcaggctcatcatctcgcccgtggcgcctcggaaaaaggtcgagacgacaagaatacctaccagactctcagttctggtcttcctggttacgtcttggtgcacgagaatgtgttgacgctcttgatgcaagcattggaggcgtcgctgccgtccaactgccaaccgcacgtccaagacctcggagcggcggaggatatcctcgcttcgggcaaccttgactacctgccgatcttttccgttcgctctctggatcacgccatggataccattaacaatcgattgccggcgagtcaaatcgcgtatgtgtttggtgaagaaaggtttgggtcgtatgccgcacaacatttgagccagaagacggtcgctatcaacgatatcccgcggcaactagctggtatgtcgtctgctggtttctcacatagatgtgttactgaccccttccttaatcgcagtgaacggtgcgtacgcatcacgaaaggactttacgatcgcgcacgaccgggtcttttgggtcgccaagaagcccacgcgggagtacgagacggcggttgaagggtacaagagcctaaaggtcgccaaacttcatcaagctggaggattcaggatcgatttcttcggtggcagtgagtttagcagtcgatgcagcaatgcaaaggttcttccgattcaggtcctgatcgattcgatgatcgcaggtttcttgttcgccgcgagcatcttcttgacttgtttcttggggacttctggatgggcagtctatcgtggtgggttgttggcattggctaggtggcgagggatgtagatctttctgttgttctttttcctgacgtggatcaaaggagatgtatggcatgtatgaatagttgagagacatgatcgaggtggaaatgagacgacatgacacttagcaaagtcgacttcgactggtatgtttcctgttgttaccaccttcaaacacctcgtcatatcattgttatcgaaaacaccctcagcctctccatgtcgccgacttcgtctcgttcccactcttcagacagggtagtccttggaaataccagtcaatcagacaatcacaccgatagcacgttcaatacatttcccaaatctacgtttacaagcagacgccccggtccgacactccctctcgcgcgtcctgactctcgactagctttctaccactgcccgccgatcttgtacttgaagacatcatccgtgacccgtccaaccgtattcctccaagccttgttcgccaactacacagagtgttgacgctgtatcagctctagtcccaagcacgttgatcagacgactatcaactcacccccgtgatccgaacaccggtgaacatgaacagcaagaacgtatactcgatattgttctgccccatcggccttgactcgtaatccacatgtcgatccaacggtcgataatccggcatccccctcatctcggagggccagtccgtagggctctcgtcgttcctcacgggtgggaccgccggcgaaatctcgagggggacgctcgagatcctcgcatccctagcgacggcggtagaggggtgagactgctcggcggccccgacgagctcgagcacggcattgcctgcaggtgggattccaccttctgcgacggtcgtgtaacttcgttgctgtgacatggtcgagagattgattgatcttctagcttacggttggaggtacttctctctttcttcctgtcaacttttagccggcgaggtcatcttggcaaccccgacgctaatatcttgtcggtctcgtcggtatgggagcacgccctcccgcgcaacccgggcttccgggagcgacggaaattcggtcctggactcgccgttccgccgggctcgtccgcgctcgtcgtctatatctagtatgaagagctggaaatcggatctttaccgtaggatttagctgggaacaacactgtgagagtctgaaaatccgaccagtaacacaatgtcgaaagagagtaagttgaatgatgcacccatggaagcgatccgaagtctaccgctcacaatcgcctcgatcgaacccagctacctaccccgtattcttcttcagccatggttcgaccgccatgttgcaatcgcgcacagccccggccgcctactgggaagaagttggtcgtcaagcattagcacagggcgtagaacgactcgtcatcatgggtgcacattgggaaaccttgggcgagaccgtgcgggtatcgggaaaccctaacccgccaaaacagcccgttgcatggtaagcccggcatcacggcgatttttctacgcatcgattggagctgatgatcgagtactcttattccaccagggtcgaccctaaactctataccgagttcgatctcaaccctgatatggaactcgctgctgaagtgaccgagatgctcaaggattccgggttcgacgctgcaatggattccaagtttgagcagattcatgacactttgtgagtgcaacagaggtatcgttgttcggaaacgagggcgttggctgaacgatgacccggtactgctagcatgatcctcaaatggatgttccctggagggaaatcactgcctcatgtcgttgtcagccacaacgctcgattcgatcccgtaagttggcggccggggctctcgatgcaaagtgctatcattgaccagatagctgtacttgtagcattttcacctgaagatgggagcggcccttcgtcctctacgtaatcgaaagacccttctcatcggctcaggtaggtcatcacaatcggcaactcgaactagctcaggtgattgacccgttctgcaacccaggcggagccgttcataacctctatcgaaacaactggcatcaggtaatcatgtaccgggatcacctagcacaagaacgacctccagagcagtgggcgatcgatttcggagaggccttttccgatgtcgtcacgaacaataccggcccggctctgcgacgtggactggctcgattgatgcaacacccgcagtatcgggatgcagtgagtccgcccatcatcgagcgatcggtttacaactgcctaacgcctctttaccgtatttgcggccatacagcaaggtaccgatgaccatttcatgtcagccctcttcgcggcgggtgctgccggtgacgctgaggaccagggagacaagaattacgccggggccgagtgctgggaattgctcaacatgcgcaacgtaagcgacatggcctgccagataagtctgccgtatggcaagctgatgactcgcttttcgatctcttagtcgcaattccagttcggagattggcctcaggcgccgtatgtaacgcccattcacacggggacgcaggtcgttcattcgatctagacgagtatcgctctatcatttgtattttggatgtacaccatggtcccatgatctgaatttattatgattggatgatgctttccatttgattgagcgggtacaaggccaggccaggttcaaggcaacctctggcgcgatgtagaaggggaacggcctgcctgtgtcgccggcgtcgtttcccgctcgttccgtgccatcattgctatgcacaaagaatcggtccagcctggtactagcaggaacaaaggaaagcagcgaaaaacgatcgtttccacacagatgcgatatatactttcggactggatctgtctctgtcctcacagttcgtgaacactatgcatggtaatctcttattctgatacattggccggtcgcacaagtcccgaacagataccaaacccgacattggcgatctggccgtcgtcttccttgcgctccacccgcgcacacatgtcgacgacgtccccatcctcaatccagaccctggagtttcctccgctagtctttagcggcttgctacctctttcagtgatttcgagcatacaagccaacgaatcgggttcgggacccgagatggtgcccgatccgagcatatctccggcgttcatcgggcagcccgagacggtgtgatgggcgagaagttgtccgaagctattgaagcgggatagcgagtcagcattaagacgctggccgtccgcatgtacgagcttacctgtaggacaagtgcttgaggttcgatcgcatcactgtggtggcctcagcttctcctttggctacaagatgtgtagaatcagcgattgtaacgttcccccccagttggtctgtacatatgcatacccttgatcttcatctccaatggcaagtcaaatgtcggcgcgtcgtctttctcgaccaaatagtccgcgagggggatcggctcttcctatggagatcgatggttatcagcactaagtcctcatcatcgtcaaaagaaatgacatgtcactcactctgacaggcatggccgtcttgaaaggagcgagggcgtccagggtaacgatccaaggagagactgtggtcgcaaagtttttcccattgaagggcccaagagggaacatttcgtaaccctgatgatccctatactcgatatcgaagatcagcctcaccgtagcgatcggacctaacagaagtgaggcagacggccatgctcacctagcgctccaatcgttcatgatgaccagtccaaagacgttctccagcacatcgcccgtccctagactactccccatgtcgttcgccttgccgcccacgatggccgccatctcgaactccatatccaaagccctggtagggccgaaactcggcgccggattctctgaccctggggcgggacctcgaagacccttgggacgggtgataggcgtaccggagacgacgatggatgaagcccgaccgtggtaccctacaggcagatgtgtccatgcgggtggaacaggggggcctttgacggccatcaagcggccggcgttggttgtatggtagatgctcgcacctacaggtaagatacgttcagtgcggtgatacatcgtgtcagaccgcgattcgacttcgactcacaaaagtcggtgtaatcccccacgtggacgggcatgtgcatgatgacgtccttttcatcgaacaagaccttgtccaggatttccttgtcctgctccagctctgagcccgatttgaacagaccctgaagccgctcccggatcgcccgtcgagtctgcagaggttgactggcgaacgagttcagggtcgactgtatcgatcaaaacacagtatacgtgtcaactaaagagcgcctcccgatcgtcgttgtcgtcgatcaacgaggtcgtgcttacagcctcgaaccatgcttgagaatacccctcgacctggtccaacttgccagcctgaccgagcaccttcaagctgatgagcttgttcccgattatggttccacaatgcttatccgactatcgaacgaccatacgaccaaacgttttaagaggtgatccgttggatttaggtggtcaaagacagaccggggctactcaccggtgttgcgcgcgaggaaaagactccgaaggggatgttggcgagcgaaaagtcagaatcggtagggacggcgatgaaggacgacatgatgtgggtttgaacagaggattgtagacttgaataggatagatgacgatcgaatggtcgaatcctcagggtgcgtgttgtcagcgttgtttgagagtcttaatcggtgctggatcttgttgctgctggacttggaccgggtttctccctcccgaccaagctgcgccgcatcttgcgagcccggccatcgtcacggaaaactcggattcaacctccggaccccgccgccccgctttgagcgtagagcatcttccggtccataccggagattcgataacgatcttcgcagggtggtataatacggatgaataggatggcggtgtcgcacagctattcctacgagtaacgtacatccagcctccttgtttccctgatcgattaccacctcactgctacttttgaatcgactcgctcgaaatccgttcagatcgagctacctttactttggcaatcaaccaaaatatcgcgaccatcacgactaccatcatcatgacggcctccaacccactccctatgcctaaacccaatgcacttctcgagatcatcgacctcccgaatatgacgttcgagaagaacgtcgatatccccttgaaagacggtcaaggtctgtgtcgagcaaactgttatcggccaaagggtgacggaaagtggcccgtgctcttgacatgtgagtgtccggaaatcccgatcagttgatccgcgtcgccgtttcgtcccgttccatatgtcagtctgcggagtcgatcgacggctaatcccaccaatactgtcatcagacggaccttatggtaaagacgtgccctacgcttcattccacggagcatcgttcgaggagatccccgatgaacagaaatccgatctctccgcatgggaaactcctcacccggactactgggtcgctcagggctacgtcgtcctccgggtggacgaacgcgggatcggttcgagttacgggttcttggataccatgagcgatcagactagtagcgatttcgccgaagtcatcgaatgggccgctgatcagccttggtccagtggcaaggtcgggctactcgggatctcgtaggtcgtctctcgccgcgttgtgacgcaccctagctcatcttttggtctcgccctaggtattacggaggatctcaatggcgagtggccgcccgtaaacctcgtggccttgccgctatcatcccttgggaaggtgggtccagtacaagcgacaagctccggctccttctaaccctgttcgtaggtatgaccgactactatagggatcgagtcaggcacggaggtatcctcgccaacaattttgtcaaattctggtgggagaaccaagtcggtcccatgcagtatgggacggccgaaaagaagcctcgaagattcggtaagttgagatgggtcactggttccctaggcctgagagaggatgctcaatcgatcatgtccaaccttcaaaggccccggagtcatgggacctcccgtcggtaagcgtgttcgtgctcgcgaatcaccgtcatattcgccgagctcactcgcgatttaccgctttcacaggtcccgaatgtctcgaaggtaccatccccgagtccgacaggatcgccctccgtagagaccagaccgtggacaaccgggagaaccgctacctcaatgatccctaccacgccagccgggtgtacgatctcggagcgatcgaggttcctctcttgagtgtggccaatctcggtgggatcttgttgcacctgaggggtaatgtcgtagggtacatggaggcgggtacgaagaacaagtggttatacttcatctccggtcggtaagtgggcgccgtggtcgggttgggggtttgatcaggcgggaagctgatgatgcctctcacgtgcccatagtcacgacctgcctttttacctgccgcatttcgttcagctacaaaagtcttgtaaggggatgagtcgcctgtcgatctgtatcgatccagctgaatctgtcttcctgtttcagtcctcaacgcctggcttaagggagaagacgatgccggctggctcaagggtcccaacgtcgacgttcccgctgtcagcttactcgttcgaaagggcaaccccggtttcaacacgaccgaggccgaagccaccttcaagttccgacccgagactgaatggccgcccgcaaggacgcagtacgtcaagcattacctgcaggccaattcgaaaatgtcgacaacgccacctgcatcagagagcaaggactttgctcttcaagcgcttggcaagggagcgcctgccaacttcgaggtcacctttgacaaggagacggagattgctggacatcctacagccaacctcgtctactcggttcctaagagggctgacggttccgccccaaaagacatcgacgtctttttgaccctgaggcactttgacgcgaacgggagggagatctactacacgggaaccgccggggatccggtcccattatgcaagggtaagcgaaaacactcgctagatgcaagtccattggctcatcatcgatccgtgtctattcaggatggcttcgagcgtcgatgcgaaaaatcgacgaatcatctccgcgtcacaaagaatacctaccccacaggaaatatgaatcgtcagacgtgtctcacgtcgaacctgataccaagtacgacctcttggtcgaactatggcctactgcagtggtcgtttcacccggcaataagatcgtgttggaggtcaacacgggtgacagtcaaggatgcggtatctttttgcataacgagcccactgataggtaagcaattgcagcgcttcgctccgagctcgagtgctgaaatcttaatcttacccacgcaggagcgaagccgactttgacggtgtcaacactttgcacgtcggacccgagcacaaaagctggctctctctaccgatcgtctagacgactagatcagtcaccctgtactgctcctgaatgaaatcatatatgcattctctgagataaagcccgagtcacgtaatgctcgctatgaggtttgttgttacgcgacttttgtcagcgtcattgaattgctcagcctggcgctgcagcctacatagcatatagatcgctgatccagaagtctacagagtgcgggctccgagatcaaaagcttcgagctcctggggaagcgatcaatcatcggtagtcctcgagatcgggagcggctgactgccacgtggattacctgactaacttccgtccgggcccaagcgaagcgatcaatcaggccttttcgaacttgtcccacgatcgattctgatccctcatatagtcaccattgtggaccagcttcatcgcgcccaattgggtcttgtgttcctttagctggacccagtctggttcagagatcatacagaaaattgggacgggttctttacggcttttcttgcggatccgagtatggtgaaattcttgacggtagtcttcggcgattgacagatttgaagccttgtcgtcgttgttgatcggatattgacgactgcgcagtgagatctgagacaagtcaccctagcttcagcaagcgctaccggcactaaacacttgatcgtcttgagcgctcgtctgcgtcctgacatctggccggcggtgctcatatcaaaaggtccgacagcggaagacattgcatgaggcgcacttggggggtcaatacatctggacccagctccagctatcatgattatcctcgttcgtcacttcattttgtgcgatataaccttttgattgtacggtggcagatggcggtggagcaagagcgtcccacaaaatagggataccttcattgtgaaaattcctcgggcagctcagctcattcatctccggcgcattttacatcttttgcatgaaaatgacattgccctccgttccgggatctctgccaaaatcggtcgtttgacttcacaaggcaggtgggacgtcgagaacattattcgctggtcctcagcgacccggcaattaagaacacgaaacttcggatcagcaatcagaccagtcgctcgactggcgcgacacagcgatgacttggctgggaacatccagtagtaagacatagcgcatggcgcttttctagactttatctcgtatcgtgtccacactgtgatcgtggaaacctgtttagccctaagagttccgttagactgaatctatcagaccggcgaagtgaagcaacttgtttaaactcttgtgaaattttcctttgacaacatttttcctcgacgtacaggccttgagtaatacagtactgaaccttcccgtagagaatgtaacaggcacgatttaaaacgcaacggttcgaacttggatcggagccttccgctttgtcattccctacggatgggcactgtaagggaggaggcgcatgcagctgggaaaatatagcaccgcgggtcagcgtgaagtcgtcagaggatgtcgtaaatgtggagtgagttgcaaacgcgattgaaaaggatgtagctatatgattgcagcgtatcttgtgaactcgatcggctcgaacaatcgggactcccggatatgtggattaagtcacaaattccgtctacgtatgtgtttgatttatctggaaggaagcttaagctgtggaggagcgcctccacaacaatgtaaaaatacaattccgcgccacctcgatcgtcacgtctactggaacgctatcaagcagaagcgctaatgtagggaacaccagtaagcttaaactccctctcgttcaactcgggcctctcttttggaccatctcgattggcggggcaaacggtaccgtccgctcgcgtggcggtccacttgacgctttgaaggcattgaggccaatggctcgagccgacgccggcatcgaaggcctccttcttcttgcgtagatcctcttgagtagcggtcgaagccggggcgaagcacgtgtagactgccatgcggacattgtcgcccttgggcgcgacgttataatggggaacgcgcgaatcccaaaggatcaagtcacccggctcggcgctgactttctcaaattcgtatccacgttctttaagccaggccaggccagtatccttgtacccgtaccactcgttcgtccattgccaaatacgctcttcatccctgaaggtgttatggtactcctctgagatcttgtgacctcctcgcatgacgaccaaaccaccatcatcagggccgttcgggttcaagtttaccaacccttgaaggcagcgaaatccaggccgctcgggatcttggtcttggtgcgcccagcgggaatttttgggggcgtccttgcggttgggccattgcacattgacgatgtcgaaagatacgatcaaatcttcggtatcatagaccctaagatggcgttgttcgggtcagtcatttgcttaggagtgcataatgaggaggtggtacttactttgcaaaagcatcgacaacgcccggttcgcagcggaccttccaaacccaattctcatggctgacaccataatgcatgatcactatcgagtgttcaccagtaaggggaccggatgtctcggacgttttctattatagtcgtgtaactcacttcctttctcgttgatgacgggaagattttcagtcttccaagtggtcggatcgtcttttttgtacccgaatccgctgcctcaacgatcaagtctcaagtcagacaatctccttgagataacggtcgcttaggcttacaaatcttccatgtatcggtgaaaggcatcggcgtgctcggcggctctctcaggagacatggctttcacaacggcgaaaccatcacggacgaggtcgtcgcggaagtctccatagacagtctcgccagagaagtcgagcgcgtcagaagcctcgactccgcggacgcgcatggtttcaggtcggcccataattcgatatttttttcttctgtgggggtaataataaagagtgtgctagtgggtgcgagcggagagaaatctgattggtacggtcgtggtgtgaggcgaaccttctcaccctaattgatctaaagcacaccccaactccttatatacatcgggggaacgtgtaaaggacagtccttcagatgaaccctgcagttaagggagggcccggccggctccgtttccgtcccggcaagcggagattccggcagcagtcatcattgtgagcatccggatcacctatagagatgtcgcaagtcaggtgatactggtcaaagtccatgatgtccgggaatgtatggatcgggacggaaatggagctggccatcgtcggaaacacggagaggcgagtctgccgctattttcacgccgcggtcggagtccgcgtcatcttcaaggcccaagcagaagcgcgttacgattttgcgctagaagaggaaacaagcctggcatcgtatcgtcgaacccgggtcaagagcctgcacggcggtcattaattccacgacacgcacgacgctggacttgaattaaccaggcgagcagtcttgacccccaagcattgagtgcctgtttgtcgctatgcacgatttcaaatagacgcggaaggctttccgtggagtcgaatatgaatcgaaaggtgccttcgagaaggctattttcggatgccggacggcatcaaccgtctagtgactaggtgaactcgctgggcccaacgtgatgtgagcggcagttgcgcgatgagctgtatctaaggttgcatcggcaatgagacctggccagccactcaggaagaactggaatgccgctaagattgagtaacagagcagatcgcggggcttagcacattggataaggaccacatctgcagccgcggtacctcaagaacacgtcactccgagcgttcaatcgcgcgtgtcaaagccgcgctaaacggaactgggctggcgcacggagcgtgttatggatgaaggatctaatgagatcaagatgactgcttcatagggttcgttggtggtatcgatctcgcttacagtggaagctggactaaactacgctggcttcaggatctggatgacttaccgcatccttcttcccaacgtttcccatctttctcacgaatacccctacaaggagtccagcgagtgcggacaagccgaagcaagtccagaaggccgctcggtaaccctgtaggagagctgttttgggtatagagctcgaagttgtcttactcgcgacaatatcgatgcctagcttggcagatcccatttcagcaattcgatctgagacgatggtggatatggacagaaccaggacaccgcctatctgggtgacagccgagaatatgctgcctccctgtccttgttcatcttgactgctagtcctcgagatgaagagcatgctaggtccgccaaagatcttgataaacaaaagaagacacgcgataaacccagagatgagctctcaccacgtcaggaacatgaaatccgctccccacaccaaaatgcagcaagcggggaattgcattgcccaatctaggatcggaattgtactcattagcgcatgatcgcacatgttgcagctgctatcgggctcacaggtcaaaccagcgggagtcgtcgcgaacaacaaaccggctagtccagtagcgaaggacgcgatcaacagcagtatatgcccagactgcaagcaaggtctcgtcagcagggttgttcgacaggtggctgggagtatcttactatgtgggcgacgcaaaacgacccgacgacattggcagctatgcctacgatacagaggggaaggaaccgcaatgttgcttctatgacaggcctctcttcgtagctccgccagtaaaggctcatccaaacgatgatgctagatagaacgcagagacattcgttcagatagctacgagaaaattatttccttgcgattcgatactcacgcgccgaaagcgccccctaaaaagagtactgctcccattaaagcgccgaacatgtcccgtctccaaattgaaagcttcatgatggaaggacgcgtgcctttcttctcgaggtaccgctcccaagttaagaagagcccgagcagaacaaagccactgaccagtgtggccgaaatgtaaggggttttccaaccagaggcagcggtgccgccttctcctagagggaacaagacgcaaaatatgcccccgcccgagaggacgacccctacccagtcgaggtgtcgcaaggcatgcttatgctttgtccgaggtatgatacttccaggcgcaacaaacacattaccaatggagagcaggaaggacatgccggaacagatgtagaaaaacgtccgccatcccgctttcgtatactgggtcgtaacaccagccaaaaccagcccaacagccgtgccgaccggagcgccagctccgagtcccgcaaaggctcgtgacttaatcgggccttcggcaaatgtcgtacctatcaaccctatagccgcgggtgtcacgctaatacgatggtgcagggcgatgtgtcagtaaaatggccaggagggatgtcgatccagctgcgctcaccccgagaaagccactcctgcgagcgcgcgaaatatgaaaagctggtatttgttccgcgccaaccccatgccgaggaacatggcgcctccgatagccgatccgatcgagaagactggtttgtggccatacatgtcgcagattttgccagacagtaacagtgtgcacgccgttgcgagggatcccgatgatgccacccattgaagttgacccgacgggatttttagttcctggccgatatcagcaatagtgatcgatcctccgataccagaagcaacctgcatgagagcggatgtcatgaccagtgcaaccaaagcaatcgaccggacagtagtgatctcgggaaacttgtgcgcgacatcgctttggtcctccaggatggtaacgcattcaagcaccgtcggggacacttcgattccgccgtccttctcctcgcgggcaatcgccactttttcgggaatatctgtatgggatttcatatggtggtactatcgtctatgtcaatgcgattgctattgagacaaccggatggggcagcaacactcagtcgtgtcgcagttatcatatttgtgataccagcggaaaacacaaatccgattttgcgacgggcggaatcaaaaccgatagtcgctctggccgcgttcctggccggattctgcggcaaagtcgaagccgaaaagattcgcccagacgtctccgatattggcgatagacgaatccaggggtggatcgcgggaatcctcgagagaccgtacgtactgttctccaatgtcgtattccgtttcggagttttcatcgcgatctatcgggttagtgacccgcttgcgaaccatctcgttgaccgattcatacagctctacgtattgtggcggcagaccctgctccaggaagctcttggtaacgtacttggtggcctgcgacagtatctattcgaccccaggccgttcagatgtacccgagcgtgtgtaaatcctcggccacgttcgcttacctcgaggtccgctctggcctgccatgtagctgagtgccggcaaacatgcagactgagagcgtatagagctgtaccgatgctgtgtaaagtccagtattctttcttgccagtattacgtgcacaggcatccaaagttgtcaaaatagaacgagctgactgaatgcaaatgctttcgctggattcgaggatgtgaaggaacggctggcgctgcaatcgaggatgggagagattttgaagcactaatcggggatgatcgattaaagatagcctatgtaaagtgatcaaactatggtggtggacttttgttaacgatgtggcaaaagtaacgagtcgagatggaaggacccacgtctgatgatactgcgtatgtaacatgcatgcccacgggaagaaagggccgctagcgggcttttcgccgcctggccggagctccaccggtagcgattttgcccatgcttcgagacgcaaatggctttgtccgataagctccaggacctctacttcgtaatcggcattgacgggcggagggttggtcgggaatagagtctgggctatatgggcgatttcttgacatagcgtcgccagtgccttgaggatattgaccggctggcgtaccgttccgaaactgaacgtgcaatcgtcgaacgatgacagggaggttgagtagtcgctctttcgtaacaagactggacgacctgactcgatcgaaccgatggcgtccagcgagatagtcgtgtaccagattcgagcgtcaaggctagcatcgggacccacgctgtggcgatgtagaccgaggctttgcccaatcctgactgcgatgtcagggcgtctcacccttttaaatttcgacagaacgaatggtatgggagaaacggggaactgacttactggccgtgccaaccatttgccatgcaagcccgtctttggatctctgtcagtgaagcaacgacttagaagccgttatcaggactactgcggactgtctgggaacctaccgttctcatcgcaatagccaacaacagcagtgcttgtactgaggaacgaaacggccgaccctgtatgaccggtaacgttttccacgccaattcaaagtaggttcgtgctacggcagaggactggtggctgcttggtgtcatgctcgctcccagactgatgacgagatacaagaccggagtcacgaagtcttgtgcaggcgattccggtcctttagcgcgatagaggagtggtctgagccacgtttcgtcgactataggatataagacgtgaaatgtcttgtagtatgtggacacgtatgtttcgagtgctggttgtggtggtaatggatgcaggcaggtctcctcctgtccaggtagtattaattcttccgccgatgacatgccatgcttcaagtggcgagatggacgttcgcctccactttcgtcgtccagccatttaacgaacaccttgtcaagacgaaagttgcagggtaagcagttcgcatgacccttcttgcggaaggctccactcacttgggacgacgaggccccgaggaatttcttgcggtgagctgccgtgtgaatccagtaatcgtcccgcccccggatagtcttgcggttcgttcccgtatcaccgttttgtggttgcaacgtcaccatgttcggggtagatcctccgtctgccaaaccttcttgtggttgaaccagctcaccgacgtcttcggtgagaaaagcttgatcgcgcgagtgagataggtctaggctggtatccgtgtggaatagacgtggttcgttgcgaaggtaagacatgctgtccgttgtatctcttatggcaggcagttcgagagacgcgcccaaagaggttgaagctagtccagaaccgttctcgtggtacatgttcgtctcttggaagccggcagatatcgaaccaattcggctgaagaacgggtcgtaatcgtaagacagccgcccgtcgatgatgggtctcaacgtcgatgtcgagaaatctagaccagctggtaatccggccgttgccacggttggtagtcgactagaagctctcaaattttcgccttcggggagtccgttctggtctggcgattccgacacatgatgttctccgtcctgtctcgtcttttctggagacggtttcctgacaggttggacttcggtgacagtagtctgacgttccctcctaagcgccaggatgaagtctagcggagcataagttccatcgcccaccggatacagcttaggtaccggcgatcgactggcatgtacacgcgatgaagtgctggactctgaacgtgtcctacgggatcgattggctggtttggacctagaagccatgtcggtcgtgaatgaggactggggtaccgatgctgactgaccaccacaagcagactcaccggtcacactcgacttccgcccgctcgcagggctattcatcataatcaagaatcaagaccggtcaggggtccgtgtgtgggtatcaagcatcctagcttcgactgacatcacattttggttgcttcaaatcgcagcgtatctgatggaccgcgggaacacattgtctcagtcttcacgacacgaaatgagtatgcggtagacgttgactgctgctcactttacgtatccggcatctgatcgaaggcaagagactcgacaatcagaattgagacccgagcggagtcctcccctctatcatgactgacctctcgcagcttgccgcgagccgggtgcgtttccgcttagcaggtggctcgccggtgtccttttcggtatccgagttcattgttgaggtgacctccataccgttgcaccagagaatcgatagcggcaattcaagtgagaaagtactcggtgggagattcccctaggtcatcaaggcatgacgaaggcgacagatcctccttcataggtcgatcgtttagtggctccgatccgctgtcggcactcggcattcgctttgaatatgattcgcggctacagcggaagaccgatcggaagctaaatcacaggcacgctattttgaagcggacatcaaacttacatttgctggtttcagtcagaccctcacccacctgctcgaaacgacaatgcaggagcaatgaacgatgggcaatgtaactataaaaaggaatacctctcccttgattttgtgccgcttcctcctcggtactccggaccgccttgtgatggttgtatttgtccccactactctcccgactcgtcccccaacttgtatctccccttgactgcccgcatgtctcctcgccaggctttggctgcagtgccttcggcttcgaagattctagcctttaacttcccacttgtgtccctgacccaaggaggactgactgccttgggcttggggttgagattgaagggggaaataagtgtggtccctctcaagatgatggctgtcccttcacacggtgttttcttgcgctctcgatatcaatctcgacaggtatttgtcggggtcttgccaaccggttaggcaaataaataaaaatctgcataatttcccacgatcccattcaagttcactggcttgcgcctttacagactctacacggctgtcgcgaagtaacaatagtattctcaaacctccaaggctgctttcgctctggcagcccattccttcgctccggaataacgacagttatagtccatgaattcaacaggattcctgaagacgacaaaatgaatcagaaaagacctcgcgtcaagaacgaaagaaatcccactgacatggtgatcacgttcgaaccgacctcggtagcaggcctggcctgctgacgactgtacttctgtatcaatgaagctcgctcgtacctcgtatcaaatacgctcttcaaacgttgctcgacttcctcgagagacgcaggtccattgttcaaatccgcgaagaaggctcccagagcttcggcgtcctcgatactttgacttgcgccctgaccttgggttggaagcatactgtgggcagcgtctccgatcaagatggttcgacctttggtccaaaacggaagggtatcctagacaccgcacgccgttagctcaaagttttcggtgcaagcctatcagatccatgtaccatgtctcgaagttgccaaaggctaatatcaggacttgccctacggatgacaaaaaaagctaaattagcttaggcgtgccgacttcgccagtaaattcaaatatttacctaaaagtatccttgatccaatgcggaaagtcttcgaacgactgcaagagatcgtcaagcgaaccttgagcggtccatgaagtagaagcctgctcatgcataagctctgcataaacttaaacattagctttgaccgagctcgagattggccaatcccgttgacttgctatcgggaacaagagcgacgatgctgaggagctgttgttgtctacaagggcccatgatgactcgacagtctcggcccatcaacatggtcgttccgggatctttgtcggtcatcatactcgatacgtgggggatatcgagaagcttttccttagggatctatgaagtactgtctcagcactactatactggatagcgatgacgaactatcgcaaggattcgttgctgggcttacgatcaagcggtatgctgatccggccggcaaccaaacgagacatcaaatcagctgcagcgtccgagcgcattgcagggtccagcccaaactcaccggacaacccggtaggagtcgcaacttgttcttctccaaggacgctggagcgcaacttgctgtgactgcgaacaagaatcgttattgtcatcagatgaaacaaccccgctcgatgtgagctaaacttacatgccatccgcagcgatgactagatctgcccggactgtatcgccattctcaagtcgaacaataccttccgtgcaatcacacgagatagctttgcttgctactcggatactggcgggctctccctttcgcgagggatccgttgccagtctcttgagagtttcatgcaggtcgactctattgactgggctcgaatcagaccctgctttacggaccttgcgccaaaagcgtacgcaccggtgaaagcacaaacgatcggcatcgtagtcgctagtcttgaaagggactgtggagaacgataagatcatcgattacacatccagatcaacgtgaaggattgcacccacctctcatctggagctgaccatccgtacggaaaacttggaattgcgtatcgacggctcctccccctgcgattagctcatccacaatcccccagcttttggcgattctgagccgccggaatttgaagatcagctcagaattcaggatatccagtcgcaatcttgcttacctggttgcgttgggttgcagcctgggaggcggcttcgattcagcgagacccctgcttctagttctgttcgagcgcgcaagactaacgatatggccgctcctacttctttgttcatccgactcgcttcgaggattatgatctcgcggccaggcgcgcggagcgcgatagcactggccagaccagcaatgcccgcacccacaataacaatccggaagtttgtcgcggtcgagacgggcatctttacgaatgttgagatatcctggaaggccgactacattctgactatcatccaaatcaagtctactcgatcgtcgcaatttaaatgaagacgtcggaagggttcatcttcggaacgttgccgtgagttcgggtcgaccacggaaacgccattacgtgatatacggaagctactccgctgcgcaaggttaaagccgtcgggtccggccgacgccagtccctccttcccggcaccccctcgccccctaacccctaaccccgtatcagcctggaatcaagtggagcagaaaccgacgcaaagcagcctcagcggacgtgtcactgatggtgatgctcaaatcgagtgactcacctcgaagttgctgaagaagaccatcgaactcctggacagagcagaatttaaccttccaatgtagcgactctgccacaccgatcaacttgtcattctccttcgccatgttgtattcggaagcgtcggtcccacagaagtcgaatccatcgttgtctgctaagagcccttgatctgtttgatcctgattgaggttgactagcgggagctgggcggtgaggatggcttcttgacgtttcttctcggcaggactcgcttccggggtggtaaggccaacaacgagatcctgacgagtcggcgtgactaccgtaggctctgtctcactatccggtgacgtgtcggtgtcctaagctgtgagtttgttgccgattctgagccacaaacggacgccgtatctggattgcgccgcatatcagtgtccactgagcgtgtggatgcggacacacttgggtactaatccagcgtagagtcgtgtgacaaggttggcatcgggtggtctagaccgggaatctcgtcatcacctaagatgcatagcacgcagaagagtgtcagcacaagcctcaggtcgagaaagtcagtcaacaaaacagacccatggccgtatccatttcatgactatccctggccgtcccacttgcaagcttcgaattatgactggtctggttctgttctcggctgttgccagaatgatgagctgctccgtagctctgatccaatgaccgcgtgtgccctaaatacgcattccgaccgtcccctgatggtgaaggcgaacgcgatcgacggctcgaagtcggggccggcttgctttcgacctgggtgacccctgctctggcatgccgccgcgcctttctggcggccttgaattccggtttcggaattgaagccaaccgtgaggacaaatgctctatccaggcggaaagcacgggtgtcagattcggctagttgcaaggtctggtcggcgttggcgggatgtaaggacgaagcgatgctgtagacggccgctgttgtgtaatcgtgcatggccgccgcgccttgcggcgtcacgaggtcatgaggaaagctcgactggccctgaccgaaggcagtgaggaccgtgcgcaggttggtaaccgattctgtcgtgtgattcttcgcttcgatgagaaccgtatcgccgtcgaaactcatccgaacgaagtggctattgaccaacagcattcccaagatcggtcgaccggtactgggaaccgccgggttgggacgggacatctcggtggtaactatgccgtaccacagagcctgagctaaaccggtttgaaagggtactctggatacctgacggcaagggtccgtattctgatgtggtggcggccgactcgcgagtgagggcactctcaagccatgttcctcgaatcttttcgaccggctcaaactttacttcgataaaggctcccaggacgtctttttcttcttgactcccatcggcagtcctggtagtgttgttggccatgatacagatgtcgaccttgtgtggtccgatcgtttgtgaaacagatgtttgagtgctgcgactcgcagttacaatgtcgaataggaataactcgcgaatttgggcatcgagagtccgtttcgcgttgctcgtcggagcctcgtatgctggcggttgccttggctcgacgcttggagacgactgtcggatcgattcgagaaagtccgtgtataggtcgtacgaacgggattctgcgtacttggtcacgacgtcgaaattcctaagatccaactgcgactggaccatgagccgagaccgtgtgccgcgagcttcgggggggatgaggaagacgatctgtccaaccagttgtttcagttgatggacgatctcggcttcgtatttactctcattcgtggacctgaaattcaggacctcttcgattggattttcaataggcgaagaaacagtccttatccatgcttcacgctgcccagggtcgagtctggggagcggacggcgtatgctattctcgatctgcatcatggcctcggtgaggcgtcgttgaaagtatgaccgagtgtgcatgccaaatgaaggctgaaagtcgagtaaaagggacacagacagctaaagatgctacccagaagctgggcctgcgtgatgatcgaggcagatagccacagcgcgttgtgtcggacgattggttgtaatcgagcgaaaacgagctgctacgaagaagcgatacagcgcatgatctcagttgcaaagacacaaggagtaagcctcgttgttcaaattggcttgccaaactttagatgtagctagacagctcggagtgcaattacggctcgatgaaaatcaggtcgagcaaaagaacccagactgtggttctgtacggagcagagaagtaaaaggcgggaactttcgcccagagcggtggacgttgaggaagaatcctgacatttttgtttcgttgaagcaaagttgggctacgactggaagaggggtagcctcgtcgatgtcatcgccatttcgtaaggctccttcctgttttggtcgcgggccgaacggcgtccaaaagtgatgttgtctatgggcgtttgacctgcagaagcaggaggcgagtcgagtgaatagctagtaggcttctcgcataggatgcgttgtcaagtagtctagtacattcgggtattcaaccaggaaagcatgacgacgttgaagtgcaaggcaaggtgggaggtggtcggcagcaggtattatcaaattaaacagccaccaccacccacccagccagttgaacgaaagcgatcaagtgcaagtgacgtgtcatgatattcgataggttctattgattagcattatcattatcatctgctgggtgcgcacgtcacggctagttctcctcagaagcagagcagagttatcgttttcgatcgccttggcgggtgggggggttacttgttgatcgccagtcatcattccaccagtggcaagtgtgggctttagctgtccgaggcccgaggccattttcccgggctggatgcggctatttagatgaatagcgggaccagaacgcccggtccccgacaggccgagtcccctccgtcacgaggtgtgagctgcaaagtggtcgttccacacttggctctttactacactactactgtcatcgttgcgagatggtcccggggggaggtcgctgctgagataaagattcacgggcgagagcaaagtatatgggcgaagggtttgtcaccatcgacgatattgaagtcccggctccgtgcgagtggtgtatcactagacgagacccaaacggcttgcttcatcgatcgatcgatggcccgctcacatcatgtcgaccatggaccagccgacacgactcgactggtcgagttcaacggtctcgtgggcctatatctttggtcaggactagcactgatcaccgccatcgtgactttggcacactgggctcggcactttgaggtcagtagtagggtatcaagcaggttagccacatcgccgcacgctcaagctgcttgccttagggatattgtcgacgacgaagggctgggttccgagatgcttcctctcgaactcgacgtgcgtccgccttgaacctcttccctccggccgataccggaacccaaaccacgacgagctgggactggcactacgcgctctactttctcgaagcagcttggcgaaagtacagcgtgactcgattcaaggcgagtctgtccggtccggatcccgtcgagcacagctgaacggtattaaaggctgtcacgtacaggtcgcacaatacttgttcctaggctctgtgggacaattgcttctcgtaggcgtctacctaggcttgaatatcggcttgctgttcggtgccacccggggggacatcaactggatcgctcatcatgtcagtctcccagatctgatcgtcaggtcatatcgtgcacattagaccgactctcagctcttggtcgctataggccgccaaactctgctatgccaatctccctctcgtcatcggtctcgccggcaagaacaacgtactctcctggttcaccggattcgcctacgagtccctcaacgtcctacatcgctggagcgcgaggttcttgatcttgactgcggcgatacatgtcgggggcaggatatgggtcgacgaaccgaggacaaaggtgggaccagcgggatcggggtatatcatttggggttgggtggggttcacgctgttggtctagtaagtctgggctcgaggtccggcagaggcgattgatcacggctgatcacaacgtctgacctgcccgatagcatggtcctggtagcgtccagggctgctcgcaaccgggcgtaccagttctttctggtaagttgactgcagaagctcagcttgcaggacacatcgactgacatgtcgttcgtctttctggcagattcaacacgttttgctttggttcgctatcgtgccctgcttgatagtccatcgaccgccctctcaaggctgggtctgggctggactaggattacacatgctcgaccgaattggtaggacaggaaggatcctattttatcacttggtgtggccggtaccagccgacagaggtgatgcacatggagatgaaggagacttggcctgggtgacggtgctcgctgaagataccatgagggtgaccgtgcggacccgacagagtgagtcgactggtcgacatactgaggacgacgcgtgctgacgagttttgaaagactggatcgctggacagcatgtgtacctgcattgctattccgaatcacccggcggccatccattcacgagtaaggggcgccccgtcggcactgatcagcaactacacgtcgaatcggctgacgtctcgctaacactacagtttcgactgcgtctcgatccctaatgcaaaccgacaatacccgtcccaagctggcagaacaagaattgatcatacgagtgcggcaaggcatgacgaggaggatcttcgaccttggcaacctggtcgacaaggatcaaccagaacgttccggccgaccgacctatcccaaagagagcgtccgaattcgggcttggacagagggaccttgtgggtatcacgcctattgtaccacttcacgtgctgatatcagcgtccatcgctcacagacggtcatcaaaagtatctcggcgaagattacaacacgctgctgttgatcgctggcggttcgggcgttagttacactctatccatcgccctagacttggtcaggcgggcgcgcgcgatgcatttgggatccctagacaagtcagtcaacatcgccaccaagcgtttgtcgtttgtctgggtgatcaagcgagaggagcagatcgcctggattgacgaccatctcgacgcaatgtgcaacgctgctccacccggattcctgcatgtcagcgtatacgtaacgtcggtaacacgtccggccgagcatatccgtagttaccctccaactcaggaatgtaacgacagcgtggtgaccgcgcacaaagctatacgacatacccaggtcgatgtcaagccaggtcggcccaatttcgacactatcatacaggcggaaattcagcaatcagaccgggccgagtgagttcccacggctggtacaattcgacacattgccctcacactgactgcgcgcgttcgcagctggttcggagtgggtacttgtggaccgactcccatgctcgagtcgatagctatcgcggtacaaaaagccactcagccgtcattagtgcttgaaggagatttgaggaggaacatatatctcacagccgagtgggtggacgtcgggtgccgtggttgacagagcgacggtttgctaacgtgcctgtcttcccagggaattcggatggtgatcttcgacgacgtgagacaccggacgcgagagtgtgtttgaaactgtatagactatgatacccgtccagcacaaggaccactacgccttgttcactagatcgccttatgtgtgcgcttgccaaatcggacgcgatgtccaaccaatcgagaaacagattgacgagctcggtgataatggatatagggaaccgagaggaggtagttccggtcatcttggtcttatggccaaaggcgcaagtacacaaggcggacgatcggcgtcagtgcatcggaacagtcgaaaagtatgtagataatttgcgccagttacacagtagatcttgtcgaccggacattacattctcgacccaagaacaaggaagagaactcggtagtcgcaccggacagcacccgttgcttggatcccgactgatccttgtcaagcaatgtcgtatatcagtaactcgattggtttcgtgcttcgcagtgtcgatatcgatgttgatgctacacccgataatcaccaatatcaaactgcaaattgacaatttgactaccggctagaatgagtcccggtatgaaggtcgagcccaagcatagaccgacggctgcttactgcattgtgtcacgttctgcgttctaacgacagtcagtcgcgttagacggctgcccgtaaatcatgtgaactcactctttggaacgcgaccgccctgagagcatttcaaggctttctcgggcggcctggagcgattgaaatacgccgacgatggactaagcgagacgctaggagaataatacctgagaagtcgttttaattgattcttacaatctccccgtcgacgacccctgcaaatgatcagtccgcctctggccgctcagctaacgccaggaaaaacggagctcttatttcgcttcttacaagtcctgtcaaatactcttcggtgtctatgctctgttcatccggaagctgtcgttatcgtcgaatcgagtaccatctcgctctgatcgagaggcattaacgccgtcgggccgccgggctgatgaaaacccatcttttcatgcggcgcgtttccggtgcactctgtcctcgttcgtatataaggttcgatttcacaacgggaccttcaggctatcggagttcgaaagacgccatgactattgctgattctccaatcgtgcgctctacattatctccctcgaccgaattgacatccgccatggccccgaagcaagcgcgaccacctttggacctaggggacatcctgctctacgtagcagttgagtctcgattcgacgttccggatctcatggatctcattgactaaacatgtgcatggtgctggtagccatctttgtgcctcctatccctgtcatcgccaagcatggatgttcctggcagatcggtctcaatattctactctgcgtcctcggctggattcccggtgtcatccacgcatgcgttgtcatcgcgcgtaatccggccgttccctatgcgtgtcccccctattgagaacagtctgccactggtcgtccttttccaagcgggaacatgagaatctggcaatcaggtgcataattgtacgagtagtctcctccctcaaattgtcgaaccaactcgaccgaatgcagactcgttcacgccaaccaatgacgatataatggaacctatagccgtggcctgtgtcattgtccaactctttcccttagcatgttgtggacgctgaggtaccggcttacaaggcttatggcattgtcgacgtctgagcagcctttctcaagtccgtgcgatgacgatgtcacgcagtgattaggtgacgagcagattcaaatctggcccttacctccatttgactggctgatggagtcattcgctgatcttgatcgtgagattgcagcgggagcgtcaatagacttgaccggagggggcctgcgtagcggaacggcgaggtaccataggcttcgactgctggtagaggtccccttggtcgcgcaccggactgagtacaccagaagccctctccgtgctcaagattcgtatgcccggctgaccgagaacctcgtatcgctcaagcggcacggcaccgagaccgagccagacagcacgacaccggctgtcatgttcagagctatctagtcccggacacgagaccgatatgtggcaggtggtataggcaatcagagacgccgccctatcgacaaaaggcacgagctaggtgacgatcgatggccagacaagtttgacacggcccaaccgatattatccggaaaaatgttgtgcgaacctgacgttggcatgtatcgacttccaagcgcattgcagaggcatttctgatttccacgatgaggatccgagactgagcctttgcattgtggggttgagccttcatcattggtcaatgcggaaccggcgtccacgatatacatcgacttgtgaaattcggtcaaggaagccctttgccctcttcccagcccaagagagagtatccgaagtcgtgtgaaacttggtcgatcgtcgggtgaagagggtcggactggacgtgatttaggagagcctgctcatgttcagatagcaaagcggctcagtgattcgatcagacaccaaagcagcatacacgacctacctgtcagattcaccccacgggctacaggtcgattttgtatgcgaccctgttcatcgtagcgaccttgtcgtacagcttacgagcggccgcattatctggggccgtcaaccagtaaagcctcgaacaccctcgactctccgcttgacgcttgaccgcctcgattagaagccttcctccgcccgttcctcgtcgagcgggatccacgtagagatcgttgaggtagcattgaggttttggagaccatgccgaaacgtgataaaggtagtgagccaagccgatgggcacgcctttatcgtcttccaggatgaacccaaagaggtctccttgctcgtcgacgagccgggagaatgtattgtggtactgctcgagcggcaaggtggtctcgtagaagtgcaagtaacctttccagagctccgaccacttgtcaaagtcggtctttgagtcgatgggaatgcaagtgaccatgtcgaacggggtttcgagcgaaaatgtgagacgggtcgctgagcagattgaacgcccagagtgctttcaattgccaagtcttacgacgtggatttgaagtgtcttatgtatagccatgattcgagcctggggagaccatgctgctgatgccgacccgagtcataggagtcgtctaaataaagatcgagatgcagcgatgcagcagaactctttacaagttcgaagacatccatgactcgcatgactcggcgcggaaggggcagcctctacagagagtcggctatacaaccttcgctccggatcgacctggcccaatgatactcttcacctcgtccacaagactgatattcgtacacttgaatgatgaccatgcagagatccaaacggaatgcctacaactggcggcccgaatcattacgttgacttgcgaggatccacctcgtctggaccatacgccgggtgctcgctcaacagcggatcgagggctctcgtatttagctagagtgaccagcatgcaaggatcaacatcaatggagcaagctatttctagcatcctatgctctcactaggtgcggcccgagttgtgataacttggtcactccaagcaatcgcatggtcgtctcgatttcgtctcgcatgactatgggtcaaaccgggaatccgtgtgagccaaacttggaccacaccccgaccgtgggggtacctgcagactgactcgcgatagcatgggctacaccatcctcgccgtacgtcagggcgtacatgaacggtcttcccatcccgacacccttggccccgagacatagggccttgacgacatcggttccgcgtcggatcccaccgtcgatatatacctcgcatttaccgctctttaagatttcggggtaaaacttgttgatctcgagcaaggtatacagcgccggaggagagctgagtaggactggcgtcagcactgtctggtcggggggaaacacgatgtagttggctggacatacccatcgagggctcggccaccgtgattactcaggtagattgcctcgcaacccatatcgtacgcccgtttggcatcctatatcataatggccggctcagtacgactcgtcacatcgaacctgtttgtatatgctgtcacaaacttcggcggtctgaattcctttgagcccgatcggcagccgagtttgacgtcgtaaccagccaatgtcggaccagttcaatttgggatcgataaagccgcccaccgaacgaccgattccaccccctttactgtcggattggattttacctcccgagatacccgacgcctgcgaatcgtcgtcatgtacctggttaacagtgaagcgaaaccacagcctagcagctcgaaccactacgcaccacttcgatctcggctttccccctttcatccgcttctcgtttcccgggagccgcagcatcgaccgtgacaaagatcccctttagacgaccaaggtcctcgatcttgcggatgagagcttccgacttttcccgcttcttgtcgacgtagagttgcatgaaaaaggtctgatccggctcggaccgggcgtcgatgatcgtgtcgaggcccgccgaagcgttggtagagatctgcaagcgaccggatgagcgtgacgtcacgaaagacgctcagtgaccgggacgtacgaattggatgataccatgttcacctgcgacctttgagaagacggcctctccttccgggtgactatcgcagagcgaggtcagtgacgagcctgttgatatggtatgaatcatcggcccacccacctcagcttggccatcccggcgggtgcgacaaaaataggtagcgatgtagggtatccaaggaagttcgttcgagtgtccacgatgtcgacatcgttcatgacccgaggccggaagagtatcgcgttgtacgccgacttgttcaaggccagggctgtcacggagggtcctatcagatactgtcggcagtgatcctttccaaacctgcttactgagctcgtcggtggctccagcagaatagtacgaccacgctttggcattaagcagctgctctgctgccggctgcgagcaacgacttttcaacgatgtcccggtctcctagtaagacgaatcacccacctcgaaatctggcaggccgatgatctgcccaaggggaatcttctcgctcttcttgcttccctctgcctctcctgacggcatctcgacctctttcaccgtattagggtcgacgagaccgatcatcttgtcgctatcgatcccagactcgagcgtgccgggcggatggagtgggccaaagatcttgctcgcgtctttgcctgccatgcgcaaaatcggagccctacctcccggatgatcttcgacaaactgtgcggcatcggtaagcctggatagaatgttcaagctgagagcgcatgtgagcccaaactcacctcggtcatgtcccataccttgccgttgatgacaacccacaaatcgccgagcttgttgtgtttttcgacttctgacatggcgatcagtccacgcccagctccttgttcgagctgatgcgtctccaaatgcacccgatcccgcgagaggtagagataggctatcgagccgcatgccaggctggctccctggtcgacatcggcataccctgatcagcgtgaggtgactctgtgacgacgattctcaacgtaccactgctgcactagaccaggtaaaggttggatgccgagatgatcctctggaagagtcgtggcatcgatgacgacaggctggaccagcggtaatatatctcgttgtcgcatagactactcgcttgacggcgcgaagtgaagtttggctctgcatggtgttcagcgagccagtcggtggttcaattctgcaatccggactcttcagccccttgctatcggtctgattaacccgtcaccgatcaccaacctgcctatgaaggctcatcgattggatctttcgcggcgacctcggtgacagtgctcggcccggagttgccgtctcggcgttcacgtttgagatccacttttagcgcgttcccggtgaccatatggcgcgttcctcctcttggcccgccattgaacgaggtgaaacgcgtgataaaagccgattcttcgcatgtcgacctcggcgaatctatcgacatacaaagtgggtcgagagctttgttcatgacgctctcgaacagagtgatcggtgtccgtcgggtaaggacggctaaagacttgctggtagtcaacatatatacactttccccggacgccagtttgtgaggccacctctcgaatgagactcatcacatcgcagctcatacgcagatcggcacccggatacgaagtcaccatgaaccaatctccaccagtcactcttcaagacaaggagaagcccttgagcgagcacaatgagtacgccaaatcggacacggcgcctgctaatgaacacgatgttgtcctgcccgaatcattgatcggcttgagcgacgaggagacctcgacgatggacaagcgtatcacaaggcgtatcgatctaatcatcatgccggtgagtgaagagcgacagtcttgttgcacacaatgcatggctgacgatcaaatgactgtcaggtcctcgttctgctttgtaagtcatggggtctccaatcgctaattgtgatcatgcgactcaagacgactggttcgcagatgtcctgaactatctcgatcgccaaaacatcgcctctgccaagctagctggaatcatggacgaccttgacatagcgaccgacgaatataacagcgtcgtctcgatcctatttgtcggttacataggctttcaagtaccttccaacatgatcatcggcaaaatatcccgtcccgcactttacatctgtctcgcttgtgccggatggggagtcgtctctgcttcaaccgcggcggttcacaattacgttggcttgatgttcgcccgagtcgccttgggcatcaccgaggccgtcttcgtgagtcgggaaagtggcattatgacggagaagttttctaacctggctgctgcccgacagttccccggagccatcttctacttgagttgctggtatacgtgagtcatcaacatctttccaggtcgattcagtactgattgtgttcacgaccccagtaagaagcagttcgctctccggacagcggtactatacagtggctcccagttgggcaacgctttcggaccgttactggcaatcgccatcctcgagcttgatggcgctcatggtttggctggatggcgatgctgttgtgaatgctagcttgcctgagtgtgggctatcaaggttaaaactgagactctttggtctcagcctggtcgaaggcgttgccaccgtgggtattgccttgctctgtatattcgtcctgcccgacgtacctcaaaaggccaaactgctcagcctccgtgagaaggatcgcctcatctgccgtcttcaaatggatcgaggtcaaaaagacaacagttccgaaatctccgctttcaagggcttcaagatggcggtttgtgacccaaagacttggcttctgtgcggcatcttgacttcaacgtgggtagctgggtgttacgagtcatctttcctttgaaaaaagaccaagctgaacaaacccgatgtcatcccgctagctacatcgctgccgcggtcaataactttttcccatccgttgtctctacccttggccactctcgtaacatcacctactgtctgaccgctcgtgcgtgacccattgcccatgcgcaaagcagagacgcagcttattcgtttcgctaccagcccctttcgtcttgtgtgttttcgtcatcatcttgaatggcatgcattccgaccgtacacaagaggtgaggccgatcgatgagagcggaggcttggcatctatgctgataaggcgctcgaataacacagcgcttcctgcacatcgcctgccccttggtcatcaccgttgtcgccaacatcctcgccgtagcaacaaccaagactgcgccccgttatgtggcaatgatgttgatacctgcatcgttctatgcaaggtagatcaaatggtctattgagacaccgccatgttatctgacaatctcatttgcagcgcgatttgtaccctgtcctggatctccggtagcaccgtcggtcctgctatcaagcgagctgtagtgttgtccatgatcaatgcgatcagtaataccccaaatgtttggacggtgaatcgacgtgtctaacggatgtttccaaacattccactgagcttgcttgagacacgggcctacttctacaaatcgcctcctcgatatctggtggccttcagcgtcaacctggccgcagccgcgatcgcgatcggctttgcgatcgctacctacctctacttgcgcaggcagaaccgcaagctcgaagctggcgaacccatgggtaactcaggtcctactgaagtccagatcgcgaacgggttcaagtatcccttgtaagcgtgcgatagatcgctcgcggatgtgctcagatcgtacccgtaagagggttgcacccctgtaccttatctcactgcttgtacatgcttacctttcacgaggattaggctccggagcaatcaggtgtataattagtcttttccaggcctcgatatcatgaatcttcttgtcatggttaatgttacgggaacaggctaagtaaagagcgttagtgacacgtccagacgactatacctctcacctgtctcttaagtgactgttaccgcgtctttgtattgtgttgcgttgacctggtctgtctacatccagtgcgatatatgttcgccgagatcacgcagggctggtttgcggcgccggtgcagcagcccgcttcaccaattgcgtgaagagagtggtcatcttcaaagttatggctttgaatagagttgagtccggttcaggacttcacattcatacaaaatggatcacgttgctacatctctgacaactggtatgcctccgatcttgggctgcatcttcttgtcccagcggaacgatactcgtctacccacaatcatattgctcgtctttcgaatcctccgcccggaatcctgctcaagcgttcagcgagccattagccgcttcctcggcacgctccttaaaggcgaccttgtgcgcagcgcggatttccttggatttacggatcccgaatccgtgctggtagcattcggctacttcttcaagcgaaagtccgctgacttcgaggtagaagaagtaaatgaatacgaatccgagctggcaaagtggaccaagggatgagcaacacgaacacgcatcttgatcgatcccagccaacttatactcactgcacagataccggcgtaaataccaaaagcaccggcagccccgacatgctccatgatcgtcaagaaggtcgcactgatgacgatgttggcggcccagacacctccagcaaggatggctgatcccatgcctcgcagctccaaggggaacaactcggcacattgctgcggaaaatgattctcggtcagacacggctgtcttaatatcgcagggcagattcgggcggacttacccaggtaatgttaccggaaccagtagcgtaaaaggcgataaatacgaccatcataccgagcatcatattggaccagttttgcggatattgttgaccctcgatcagtttgccaccggtttgagcggtcattttggcgaaagcgacagcggcgagtgccagaccagcacacattcctggctgagtacaaagcaggatcctacgctttccgactcggtcgagcaagaacatggcgacgatagtgaagaagaggtttgtacccgagacgatgagaccagtagcagtagggttgtcgaaaccggccatagcaaagatggtggcagagtagtacactgccgagttgcgttcaacttagtgggtgccggggatgcatcatgatagacagcgacttactcagcgtgttgaaaccacaaagctgctgaaagataccgattcccaaagcggtgatagcgggacgcctgtaaggaccgtgggtgatcaccatcttccatcgctgccacaaagtcgtcgagttgacgagtcgcgctgagatggcgacattctcctcgagcgccgcgaatttcagatcgatgtagcgggatgacatggtgctgtacgaacggtccagggtcagacgtgcttgttcccgtcgacccttgagaagcgaatatcgagggctctcaggaaggctgtgaacgagaaaaagttttgtaagtgaacacgattaaggcacgggtcgacgccagaatagacgcacaagtgaatagcagcggcctgtaagacggcgggaaccacaccgatagcaaactgtatgcgccaaccgtgacgaccggtctaaaaggcgtgcaagacccgcggtgagtcgagcgcgcaaggctaggcagcgaggtgctataactcacgagagggacaccgatgcagtagctaaagaattgtccaccggtgatagcaatcgactggattgtcaccaaagctcctctgaagcgggtaggtgacagttctccaatgtctagatagaggaaatcagtcgagatcagaagggcggcagattacggtctagcgcctgattttcgcttacaaagaggcgcgacggctgcggcaataccgactccccatccaagcacgacccgaccagcgatgacttgagctacagagaatccggaacagatgatgatggccccgatgacgaaacaggcatcgcccacaccgagaacccatttacgtccgatcttgtcggcgagggagcctccggcaagcgcgcccatgagcgcgccgaccgaggtacccgatgaaatccatcttagggggcggtgaagatcaggaaccttgttgatgcaggcaagtaccctcatagcgacttactctttctcggtattggtaagaatatgtcctaggtcatccctgatactgaccaacgaggcgctgatgacaccggtatcgaatccgaaacagaatccgctagtcaagtcgcaaaattactgatgtcagccttgtccgtcgtgagggatggcccagcgaccatcttgacttacgagatggcggcggtaatgctcaggaagtagacaaacccggtcagctagagaagatgcagaccagtacgatagttcagccactaatcacgtaagcgacgcgtcggatccgagccgacgcgcttggcggtgaaaatctactcgcgcttccaggatagaatcgtgaagctcaccttttcggttgcctcgccggctacaagttcggcgtcgtccagccgagtttgctcgtaggctcggtcgatggccccggcacggtcaacgtcttcgacatattcggaatgacccttgtcgtcgatcttaggttcggacattgagatgaattggcactttgatattgaagggggtaattgtctgtggacaaagggtgtggcaagagctcaattggtacatcaagagccccggatgtctgacctatatgtgctattcacgagctggagcagtctggggctccccgtcgtgttcaggtctcatttggcaacctcctgcgtcaccgcctgtagacagtcagccagcagttgccgcaacgctgggcatggtcgatcgaaagtcgacccgccgcaacaaggttagaattcgggtgcaggctgtagtaacgtgaatagccgcgattgaccgtgttcgcagcatgcgagggagccaaggaggaatgcggaagcacatcaggtttccagcagttgtgtgagtttgagctgggaatcgctcggaagtagttttacccgctgccttccgtgcctgatcttcatgtgttccgctcgacaatgactgaacgattccgccgcttcggccgagtggagttgagagatgccttcgattagcgaagccaacaatagccgttctctcctcatcacgtcatgctacaggccgtaccgctcagattcggcatcatcgggaggcaaactcgtaccgcgtttcgtgtcgttgcttaggaacgacctcgtctgcttcaaaactatgatccaaatcgatcaagcgcggctgtcattgaacacctcatgttgctcctgcatcagcaaatcacactcacaagtagcaaaatggacaagcacatcgtcaacgatcctcgcaatctcgcgctcgaagccgctcttggtctcgcgcagatacgcccagagctgttcgtcgatgcaaagaacagaatcatcaccaggacacatgatcacgtcggtatcgtatctggaggaggatccggtcacgaaccctcctttgggggcatggttgggagcgggttactgagtacggcggtcgccgggaacatcttcgccagtccgaacgtcggccaaatcaggcgcggtatacagctcgcagacaagggcaagggagtactcatcattatcatgcggtagtgagtatcatttgaggagcggaatggcaactaactgactcgttacctaccagcaccggcgatgttttgcactttgggttagcaaaagagcagagttcggtctcccgccccgacgtgcctacccatctcttgattgtcggcgatgatgtggcagtctcgagatctcaaggatcgatcaccggccgtcgaggacttgccggcaccgttctggttcacaaagctgcaggagctgcggcagctagcggagccgactttgaacaggtcaagcgcgtcgcgacgtatgtgtctgaaaggattgggaccatcggaagtgggctcggacattgtagtctgccgggatccacgggaagcggcgacgatcatcacttgaaggcgaatgagatcgagattgggatgggtaaggccatccaagtacctggtcaccagtaagcaagtgctgacactagaaccaaatggatacccaggtatccacaatgagcccggggtcaagaccatgcctttgcccaagacaccggaactggtccgactgatgctcaactacatcacctcgaccaccgacaccgagcgatctttcctgccattccaacacgatggaggtgatcaagtggtgctactggtcaacaatttgggcggcctcagcgagatggagctcgcggccatcgccggagaggcgctagtcgctttaaaagaacgtgggatcaaggtcgccagggttggtgctggacggtacatggtgagtccggacgataaagtgataaatgacagtgatcaaggtgtttatgtgttgaagcttcttctgggaatctacagacttcaatcaaccttcccggattctccttgactctgttgcttctgccacatgagagtgacggggtctcgtcttcgcagatcttgtccctgctcgatgcgccaaccgacgctccaggctggattcccatcttcgaaccccggagtgtcgatagcctgacgatcaaggacgacacagatgaggaggctgtcggcaagaacagtggcagcgcagtgtcttgtacgtcttgccggtaatcaatctttggacagcgacctgacaagcccgctcgcttgaccgcagatgattactctgcctttgagcaggctctgacggccgcttgtcaccgcgtgatcgaggcggaacccgagattaccaaattcgacactatcgctggagacggggattgcggaacttggtacgtacttggagggatctccatcaaatgcatcaagtcccttaacaaggcgaatctcccaactccacagtctcaaagcaggggctgaaggtgggtacaagcggatctcacatctcaactcagataagctgatactggctatcgatcagagatgcttcgactcatccagacgggggaaatcgatcaaaatgatctgatctctgcgattgcaactctagctgaaggggtaagtgcgggccgtcccttctcaccggattgacgatcatttcgctaacctgagcaaatgggacgtctagatcgagcgtgtcatggacggaacctcgggtgccctgtatagcatctggatgaatgccttggctggaggatttaccaacactgagacagcttcattttcgacctggagcaaagcgctatcccacgccctctctagtttgtgcatctacaccaatgccagacctccttcccgtactctgatggacccgctcttcgcgtttactgaaacgctcgcttcgagccagaactttggtcaagcggttcaggccgcgaacgatgcgaccgaggagaccaagaacatccaggccaaagcgggtcgagctgcctacgtcgggcaggaccagctcagagatgccagggtgcctgatcctggcgcttatggagtgatcaagatcctggagggtattaagtcggtggtagcatagtaagacatggtcgtgacatgtgttcgcccaaagtcaggaagtttttgaagcgagatatgtcgaaaagctgtatacgaggtctagaatgtatgatggacacacgaatacaacatggaaacgagtgattcgcacgtctcgtgctcgcagatccgatcgagagctcgagagacgattcgaggaggcgcgagtcatctaaaacagtccattacatactcgaccggatcggagtgagacaccgtgtaccttctctacttcccagttcatgcattgagcaggtcacgtaggaaagccgatggcttcagaggcacaagcggtcgacgactggcaggcgtgacttttcagttcgtaccgaagtgagggaagtacaaccagaacgatagccaccgaaaaaggtcagaaactacatttcccacggagtgtctagcagtgtcgtttcatgcaaatcaaatactcgtcatacaagggagctgaaacacatctcgctctaattctccgtcgcatctacctcgtctcgcttgcacatcgaaaccccactatcgctcagagggtctgttcgaattcccaagccgacctgagctcctcgaccagcttcttggtcgcctccgtcgccctgggtagaggttttcggggcacaccaccgagaccctgctgtacgtagacgtcgagtgcgagtttggtccccgaaataccggccttgacgatgagccaatcggccgcggcgactcgggagtgcaagtcgagcgtctcggccatcttggcaggatcgcccgtagctagggcttcgagggcgacgttgtagagcctgacgatggtcttggggatgaggttgcctagtcaagagacgatgtcagttggtcggaaagcagtggagacagcgcgactacaagcaagactcacctgtccctgtgattgaaccggtcatcttggcggcgagacaagggaacatgatatcgctaaacccaggcagaacttggaacggggcatgtcgaccgaggtacgccttggactgtgtgtgagcggcgagtcgggatcccttgccgacgtttccacaagtcaactgtggggtgtatcgtgagacatggtaagtggaattgcacaggatggacgacgtcggtcgaacggactaggactcgccttggctccaaaacagttggggtgttcagacaactcgatcaacagatccgaatcgaggtcgatgcccgaagcggcgccgctgaatgatcaagctcaagggtgtcaggctaaggatctccctgtccgccagtcatacccgcgcatacacggtactcacggaaagttgtaaatcatgacgggcaacacgctgtgatcgagcacttcgacgaagaaatccttgacggctgtcttgttggcgcccatggcaaacgcaaagtaaccgggacagatgacgatcgagtaatcggcgccggcttctctggcttgcttggcaagggcgatggtgtgcttggccgagccgccaccggtaccaacgagaaggggcacgtcggtgtgagacgagttgtcgagagcttctcgagcggcacggatgacttgagatcgttcttcatccatcaagtgggaggctacataggtgaagatttgtttcagcttgatgcaatctgaaacgtattgtcgtcttgttgttcggagattttcgcagcaactcggttacagcgaaaatccctgatctccaagcgacgactaaaacgactcgaccactccccggacaacacttaccttcaccgttggttccgagcaagacgatacccatcccgctatcggcgagcctgacgacctgtttcttgacggcttcgagatcgacctgctcgtcgtcggtcatggcggtgatcaacggggtgtagacgccattgttgaaggcacgttcgggacggtagaacccgttggtcgcaccgttaccgttggtgtgggaagaggcagtagcggcaggcatatcgggttcggtagctgggttggtagtggtgtttcgtgatgaaggaaaagcaagacgaggttgaaagctggacgaaagcaagtgctgcggcggacgtctcaagcttgtgactgccggttcaaggttctagcatatgtatagttcgacccttcccaggccccaagctcgctgacgtgcgtccgaatttcggcaagcccaacaccgagtaaggaagggcgaggtgtagctggcatagctaggggaagctgtgctgcgagaaggatatctagagatgaatggttcgaaaaggggcgggacaattcgctaatcgacggatcgaacggcgttccgaggtcgacatcggaccgtcacccccgggggtttgaccacgaggacattgaaaggtcacacactggcactcgcatcacactgcgacgagaaatcatggcaggagtaggacaagggagtagatcggtggtcatcggagattagagaaatcaaaggagagcagtacggggagagggtcactaatgttgacgacgattatcacggtaaagagattgggcgacctcgccggtgaataccgagactatccataatctcttagccgtgcttgacgttacgtcgtcctatcgtctcatcgtcatctcgcagcatcacatcacaggccacacgcacactggacgtcatccacttgcaccagtccggccgtcctgtctatctgtcatcgtcgctatcgtggggatcaccacctcacacgtcgttccacgttggatcaccccggaccgctcacgcaaacttttacctcgagccgttgtcccgtccgatcgtcgcatcatcccgaacccgaatcagacaatctcgcccggagaagacccatctacacctcgacagccgacgttcagcgagcttagccttgattccgagtcgctatcattgccatccctctcatgtcaacctccgcggccaccgcatctacaggcccggcacgtcggagttaccgtgcctgtttgaattgtcgacggcacaagaccaagtgtgacctcggggacgtcaacgctccccagtctccaccgtgtagcaagtgcaagaggacccggaccgaatgtgtcttttcggctggccgacggggaggacggagcaatatcgacggggccaacaagaagaggaagcacgagcagtaccaagagcatgatcacgaccaggaggacgagcaagggggacggcagcaagaccatcagggtcgtaagcagaccagacgtagcgtcgggcttaccgccgacctttatgacgggcaagaagatcaggacgagatcgaggaagacgaagcggccgatcaagatcgacgacgtgtctcacagacgggcaatccgggtgctgcccccgataatcgtctcgattcaatctcacactcccgcacgtatcgatcaaacggctcgagccgcaacttgccgacgtcgtctgtgtcatatgggaacacttcttctcacagtgtcgatgtgcacgggcatcgttcgggacgagaccatggacgtgaacaagtagagcttgtcaacggacaacaacaccaaccccatgtacaatcccatacgcaacagtatcactctttgtccctctcgcccggtcgcatcgatcaccctgggtttggaaatcaagcctcgacgcaccgccacgactttgatcaacagacctcgcacggtcaacaggtctcgaacatcttcaacacgctgaatcgatccggatcttctggtcaggcgggagcccgtgcgggacaacagacgcagcctcatcagcatgtgcgaccggcgacgatgaacccactgatgggtcccaatgtcaaccccacgggtcaaccaggaggaggagggacggtcgggtacctagagaccctttttcatgagcagacgggtatggatatcgagctcgatctcgatcggacgatttctccacgcgacctcgagggtcaatcgagttcacattcactctccgtacatccccatgcgcacgtccaggggtccgtgtccgccggtttgaaacgagcgagtcaagtgcgaggtgcgggacccatgctgggtacggcgagtccagggcaggaggcccatcacgtcggcggagccacggagacggcgagatccggaaacgttaccgtcgatgtggctgggtatggagatctctttggatctctggaggggaaccacgagatggagctcgagctcgacatggacgggaggcagatgcagcatcagatgcagcccgccgggtcgcagcagtacttgcagaatcagatcgggttcaccgttccttctggtctacaaagcggtccgtccagtctatccctcagcgtacctgtcgaagtcggtaccagacagcatcactttgacggatccggcgctgtccagatggaaatcaccgaccctatcggtccgacgacctggaacgaagaggcatttaggcagcaaaatccggacctcttcgaggcttacggacaggcacaggcggtacaccagcaaccactacagccgacggttgaaagtggggaaatgattcatcacgaaccgggcacttcgaagcagtcaaagaggcataggttcagggccaacaccacctcggacaccggcgcaggcgaaagcatcggtggcaagaccaaggcctcatcgggatcggggatgacggcgaccggggctaccgtgtcggatccccgaagtttcgtgatcaacacgggaatgcacaacgaatccgatgcgttgcagatcctggccatggcggcaacctcgaccaaaaagaagcaagacaggcccggcaaacggtcgagatcacattcgcagacgagtcatgccggatcatccgtcctggcttatcgtcgaccaggaggagcgggagacaggcgagggacagaacaatcgagagacagaggtggaagcgatcgggacaagacggcgaggtcgaacgatggttctcatcgtcgggaggataggcaagaaggagacgaagaagacaacgaggctggagatggcgagggtctcacgacgcgggacgattcagtacaaccactttcaccatccatggggaccgactttcaggtcgatgcttcgactcgcgcgcctggatcgagcgggaaccatggcaaacgatccggtggcaaggtctcattcactgcctcgggtgaacgagtgggcaaaaatcagtccaaaactccagcagccaagccatcgttgctctcgttccccctcgtcgcgaaaggcatcatggatccggaacaggtttgtctgttcggcaacatgttcttttccaagcaccattacgtatttgtgggtcgcagttctgtccggaacatcacgaccctagtatcgttgagctcactttgctatgcccacagccgttgatatcacacaagcggatacctaggactgaggccgactatgccttgtttgccaatgccgaaccttatctaatgacggcgttcatcatcattgctagtcggctggactcgagaccctcagccaagaggatacatgcgcatacttgggcgctgatgaaggtgagaaccgagctatcctacaatatcaagatacgcacctcatgatgtcgtgcatctgcagggttacatcggcgatgtcgaattgacaggtgcagcgcccaccatcggtttggtggaaggcatccttttattggccgagaatttgccgcgggacactccagtcggcatggacgacgcttcagagggctcgcaaatgcaaataccgacccaccgctcgagagaaaagggacagctgctcaacggtgtcgagaaccgtcaagcatggatgctgatcgggggcgcgatcaggatggcgtatggactaggaattgatcaggtatggcgaagtggtgaggtttcagcctgagacggtactcatcgcttcacgacgtcttctagctcgcccatcaggtcgacaacccctccgatgaacatgttcagagagctactatcgcttggacatgtgagttgactttgcgcctagttttcccttcgaaacatcgactgattcacaaatcacactcgtcgatcagattgttatatctttgacaggcagatcagtatcaggacggggcgggcattctggtcacgagggcctgctctatgctttcggggatattcgtcacaagatcaggtaacgtcattttgaccgagactccgagatatagaccagcgattgaagatggcttgcgccctgcagactggcccagccggaggacgggaaaactttccatcgctgtgtgattctccgttgtctgagcagcagttgaaagaaggcaccaacatcactctccgagcggaaagcgccgaactgttgcaagcttgtgagtgctcaggccagcttttgcatccaggtcgagagactcatccttccattggtctcgcagatgtggaattgacgcagtgtaggtcaaaagtagttggtgctacgcccattaagctcgttcactcactcggacaatatctttcctcattcggacttatgtgtcggatacctcagtgtgagtaagaagcccgataaacagatgattgagtcgctaatagatcgattattcgctggcagcatgacaaatgtgcacgatgtgttctacccaagcgaaacgcgactccactctctggtcgttggtggcgaatactttgtgagttagcgaaccagcgtggcttcgacaggactggaatgctgaatcgctattgacgcgcagaaatacttggacggagtgagtctgatggcatctcgtcacgggataccgtgttcatgtgcccttcttattgccacagtttaacagttctctagagaattttaagatgacgtggctcaagaagacgtgagctcgaggtctcaattttaaatgcatgtctgcgactgatctgatcgcaacagctggcttgacgtcgctcatgggcacttgatttgggtcatgtttcactattgccgtctttacgcttcatcttttgccttcgtgagcgatactggaaacgttgagctggcattgcttgccctcacgctgattcgattcgagagcagcaagcacacgttacccgaacaaccgatcgcgcgcaagcatctcaaacgggccgcaagaataaggacatcaaggaagcgccatcgaattttttccctcgtagtgcgtcaacttgtcgatctgtactggatgacgatagatggctaagcgttgctactctctccttttcgagcgtagcggctgccttcactcccgatgcactggtaagctgataccgcttatcagccgttcgaacgatgcatgctaaagccttgccctgcagtatatctacgaatccatcaatgctgctcgggaactcatgcggatctgcatcgaggatatcttccctcagggcttcttgccttatctaccatcaaggtaccttttgtggttccagtacggcgctgtttttctgttgaaggtgacttcaagtccccgcgatcgtccacccacaccttgctgaaatattccgatttaggcggtgtactcgggagcgatggtccagaatgatcgaggactgtaagggttgcgtccaaaattgggcggcgaatggaaactgactttgagtggagcggtccacatcagtgccctcgacctggtggaacaactctgccaatgtttgtgtacgtgctcgaacgacagtagccatccggctgtacgatacggccgaatgctccgcgtcttggcgtctcggttggcagttccttccacaagcgcaagtcataatccctcatcccgtttgcataacgcgccagctcatcgccatatattactatatacaggcttgtccaagtcgagcgaactctcctcaacctcgagaattaagtggcgccgcggcacccacagcaggtcatcttgtgctaccgcagtctcgcggacattcgatagctaataacggcccgctactgggttcctataccggcgatgacgcgttcaacctgaattatggcctcaactcgagcacgtccaataagagcatgaactggaataccgatatcaatgacgaggactgtgccaacttgttacagtggcttttggacgaacccgccgctcagacggcgatacctaatcttttgggcgatccctttgacctcgacatccaactttgaaatgacacaatcatcatggcatggcgatgacggcacttgtagcatatcttcgcgcacagtttagcaatcaagttccaatcttgaaactacttgatactacctgctgctttttgacgcaatctgattctgcttgaagatttatcttgctgatggtagcgctggctttccgtagtacgttcgaaatcaatacatatgggagtctaggtaaacgtgcacggaattccaattccagatgaacccaagcctaagctcgtgcgccgctacttccagcgatatctgagcgttcgatccactcttcggtgctcgcagcgttgccacccttggaggctttcttgctgtcgttaacgcttctagcgacatgtcctggcgtgttacgtttcggtgtatcgtcggccagcatcaaggtcaagatttcactcctgatgaattggtcgtgggccgccgtgtgacttttgaacaaaacgtccatctgctcgagtgccacaccccttggatccggtaaagatttgataagtgtcaattgactcacgcgaacttcgatctgctcacttggtttcgggcacgcaaaaataggtccatactccagacaagaccgaaaagacggcgaagaatacgaaggtcccgtagccagtattactgatcaagggcggagtgaccaaaccctgcggaccggtatcgcatcgttggcctagtttccactcgggctaagaagtatgacttacgatcacaaagttagataaccacacgactgctgtagctagagctacacctttgccgcgataagaggaagtgtgtacttcggatggcaaagaccaggcgatgggactccacgagaccccgtaggatagcatgaaaacaaacatgaaagctacgcacacccaagcttgagcaacgttgccggcccaatcgtaagagtatttcgctgtcgatatgatggatctctggtaagttcttggtcaactttgagacggcaaaatatcgctcaccgacaaggatggcgatgatgatgtgggagacgctcattccgcaggacccctggagcagccaaaatcggcgtccgaagcgatcaagaacgaaaaaggtgatgccgacagccatgagctggaccacattcagaacgcctcccatatcgaggcgcagttcgaaactcaaaccgaattgttcgaacaaggtaggactatagtagattagctgatattttcgttgttgccgatcgtcagcttctggtttagaaaaagtgctcagggcgtcgggcttaccgcgttgactccacaaaactgctggaaaaaagcgatacccatcccgacgtgagtgcggcgaatcactccaggtcgaaatagatcgatccaaccataaacttcgcgtctcaattccatcatcagcccaggaccacccagcataggatggcgttccaggaatgcttcccgattatgcacagcttcagctctaattgtgatccattcagcctggatgcgagagtcgctgataggtaggtttcggagttgaacgagcacgtcgaggcattgttggtccttggatttaccggccagctctcgaggagagtatggcaagaaataaaccgctgcaccgagaacgatagctggcggaagagcatttcgtatgaggctttattcacagcagggcagtcgttgtggtcggacttaccagggacgatttgcaagagaaaaggtaatctaaaacaccaatctgagttgatgtagcgagtcgcataggtctgcatcacaatgaatatcagttcacgatgtcagcgtgttcctcgctctacgggtcgttacaggtcgcagacttaccacaaagtaggcgacaacgacgccgagcacgatcatgaagccttctaaagcgagaagcgcgcctcgaatattgggaggcgagatctgctcggtccagcaaggttactcgtctttcaaaatagaagcaaagagccaccaaaaagagacctgacctacctctgagacgtacatgggcgccgttgaagaaaggaaaccgattccgatcccgccgaccgtccgccccactaccatctgggagtaggagaaagaagtcgtttgcaaagccgctccggcgagaaaccacacgactcccacggcgatggacattttccttgaatacttgtcggccacgaccccagcgaacaaggcgccgacgaaagcccccatctccagcatggcagtgatgattctggtaatcagcagggttgaggtcgcatcaattcggtgttccgggacgaggttccgccccgccattcgactcttgttcacaagcatcaaaggcgcgcttaccctttgttgaaacttgcaccactagtaacggaactatccgtctcggggaatacctgcagaaattggggcatcaccaagatgatcgagatcaacccctgattagcaccaaaggagaatcctatgtgatgagaccgcctgtcagtctgatgatcgctggtgtcacgaatccgttcgaccaactgacctccgatgcaggcggcaaaagcgcatgaaaagacgatacggttcttcaggaactcatgtaccgctacaattttcgcgcgatattagctctcgtccggatgagaagctgctcgtgcgcgcgcgttcttgaacttactggcaggaccgaacgccccagcgagggccccctcatcttgaacgagacgagacgtctcggggtgtagtaccactccgaaatgtttcggtggaaggacagtctcggcgcattggaaagattcgggatgagactcgtacgtatccatcgagttagacatgcttggacagggcgcgcgtatacgagttgacttgttctggcactgagacccggttgatatggcgaaccgcacgatggtttcaattctagacgattataacagagagcccgacgtagcccctttatcattccctgtatttccccacatcgccctcattctcgcttgcgctcaatcctggccagactgggaggtaaagccacgggacgacgtcactgattgccaaatggctagcgtcgacttcttggtatcgaattctaccgagtctctacagcccagaagtgtccagattatggtccgttgagtgatcactgatcgatggcgccagcgcagtggacacagggaagcgaggcggaggtttctgttgcggtgcgtgacgaaggagatgagaaaaagatcaactaccgcccacggtgcgaggaaggtacgaggggggcaatatgagaatccgaggatagccgttagattccaagcgagggctatgacaagggcggcatgtgactgcgaagcttgggccgcacaggctccgctcgctgtaatttcgcgtctcttcacgatggtgtcctctcaagaacgagcacatcggcaccttcctggcgtgttatgttcgagagcgggatataattcaatccactcggccaagctgatcttcagcgcccaagcgtggagcgatcgcggccatgaggactatctcgtaagaagcgatctgatctcaaatctgctaagactctcagcctcaaagaccgtgaacaatgcttctgtcttgttcgaccataaggaaaacccgggacctcgagcggactgatcgatagaagcgtcatcttttctctccgtgttcatggtcccaggggcgactagcaaagtaagagggtgatccttgctcgaccttgtccgaactagacgtcacgtgaatatattcgggtagcctcacgcgatcgtactagccgctctcaaccgcgatttaccgtgcttgactaggcagtgctcgcctaggacgctggatagacgggcggttatttatccagaatgcatagatgctcatgctctgatgtcatgttgcgatcgatattataccggaacgtccgacaaccctcttgatatcgtggtgttcgacattcctacgccgggttcgccctcgaaatgaagctctgctcgatgtcggcgtatttctctggcaaacttgaaacaaacgacgaaatcggcttctgggtacggcgttcgtctcatccgaccgaccgggccgacgaaaccgagatcatcgagccgagcatgccgaatcgtcgtacttatgcatcggagcgaccagcgggcaacgatgatgcacagcagatgatcatgaacgggtcgttgacgcgttactctgccgagactggtcagataccacactgaccctgaaaaatgagtcccaccgtgttgctttttggcgcaggagcgtaagtgtccttctccaagccatctttattagcccgtgtcgacctgatcttggatcgcctcatagcatcgggtctgtctacgctgctattctcgtcctctcgaagcaatgtcgagtccacgtcgttgcccgatcgaattacgatgttttgaagagcaaggtgggttcgagcggcaccacgttactcgcgtcgaaccaatggccaacgacgtgccaccgtttcgcatctcgcatgcagggtctcgacttgaagtcgtccaaatttggagatcatcacggactcgtgtttgacggcggtaagtccgaatttgaatcgaggcgaacgccctgtcctctaacctgcagtacgatcatgccgacacagtctacaagacatgtgaagaagcagcaaagtccggcgtgactttcgactatggtgattccaagccatcactcccgttcttcgcttctcgacatcgactgacttttcctgcgactatctgaatcgcagtattatgcagcaataaagccttgctcgacgcatgtccatcgttgggcgagacgatccgaccagttgtcggagacgagacctcgatcgttttgttgcaaaacggggtcggcgctgaagaaccgttacacaaggatttcccgaagaacacgatcatctcggccgtagtgagtacaagaagtcgcaccagtggtcccgagcgtgccccgaggtcggaggtttatcgtaacacctggggcatcgtaggtctggacaggagccaaagtgatctcgaatggccaagtcgagcagttcaaccgagaagccctaacgatcggagtggattggaaccctcacctatcgcgagctgatgaacaaggtcgactggacaagctcgtcgagattcttcgggctggaggtggagaatgcaatgttgttgaggatattcagagtgagagatgggtcaaggtcatctggtaagtgccgtcaccggcttaagcaaccgtagtatgcagacaagttgacacggcttcgatgtatgcgaactatgcaggaatgcttgttggtcagttcaacgaaagaccttgctgcgagcaagccgatcctctggggcatgcctaactgaatttttcgactctttcaaaggaacgctgtgacgaccgcaacccagctccggaccaatcgattcctcgattcttctccctacgccctccacttgtcccgttcgatcatgggcgaagtcgtccaggtcgcgcgagccaagggtctgaaagtccccgagggcacgatcgataagctgatcgagcagtgtaccagcgtcaaggaaggtctgccgagctcgatgttgttcgattatctggcaggcagacccatggaggtcgaagtgggtctctagttgctctttcagcgtgcatgtcgggatgagcggctgacctgtgatcgtgagtggtttaggtcatcctcggtacgcctttgaaggaaggaactcgtctaggcctcgagctaccgtctttgactgcgtaggtttccattgtccgcgttcaatggaaccggctgcagcttacttcggaatataccgcatttcgtaatacagcctgtacagtatcatcaaggcactggattggaaaaacctgcatccccaagacgccaagatctgatactcttgggcttattccgggactcgttgtatcacttcttcttgccttgaaggcagctatcaaatgttcacattgtcggtcgacacaagactacctgctgctagatgcgagtgactcgcgcaggagctatgcgagcaaggtcgtgtttgtttgggttcttagttaccgattacagagctttcgacagtatcggcctccatctagacaaatggcccagtacgagccgcatccaattggtcttgcacggcattcgcaaataaagccttgtggcctcgagcatttctttccgggccattcgcttggatcaagatgaaaatccgagctcgtcgtttgagcggccgattgatctaaacaagcacggtcgtcacgaacccagataatcatgccaatgccctaccgtcctcctatccacaagcgagcaagatgcccgattcggcagaataaagctagtccgctgagcaggtcgaggattgcaggctacgttccataccgattctaccctgtgccaacgacggccagctatgaccgacacggctcaatcaacaaaatttggttcataatgcttgacgataaaaatgtccttgtacaccttgctatcctatggtcatcctggaactaccgttcgaccgccacgcctaccattccctgatggccccgtcgggtcctcgccacgtcgggttcctccagctgaaatcggcattctcctcggcgttcttcctgatcatctcttcgtccaactcgatccccagtcccggagcggtcaagagctcgacggctccgttcttgacgtcgaagacttctgggttcttcaagtaggtcaggagatcaaagtcgccggcgttgtagtgcatctaacgtaagacaaggcggaacgcaaggtcagtgacggaggtcagggatgacgggtacccaaggtctgactctcaccttccagctcatttcgcagatgacaaagttgggggtagagaacgcgatctgcaatgacgccgcaaacgcaatcggaccgagtggacagtgaggagcgaccccgatgtcgtatgtctctgccatgttggcgatcctcctcgtctcggagattccaccggcgtgcgaaatgtcaggctgaatgatgtcaatacatccagcctcgaaatatggtcgacagtcttgtcgggtgaacaacctctctccgagctgtgaacgatacgggaggatcagtcagcaatcgtcgtcgacgagcactcggcggtcccgggctcgacactcacggcgatggggatcgaggtcttttggtacagcttttccatctcgggaacctggcccggcaagagaggttcctcgatgaacaacggctggtgaggttccaacgccttggccagctgcttggccagggtcttgtgcactctcccgtgaaagtcactgccggggcgcgaacgcatacaaagtcgatcagccggagtatcatgacgagggtgcagcggatgaccataagtcgctcacagtccgacgtcgataccgatcgacttgacctccttgacacgctggatggttgcctcgagagcgtgcggcgaatcgagccatcccaactacgatgtgagccgagatatcatgagccagctattcgtaaccaaccactcggtctagaaatcagagcagagtagagccgttcgacttaccgactctacagcgttcatcttgacggcggtgaacccctgagcctttcttgccttggcctgttccaagacgtccgagggcctgtctcctccgatccagccgtacacgttggctcgttctcggctgcgggatagagacgtggatgttcgtatgagtattacgcatgacgatggctgtaaggagtatctggcgtgtatagggtgggacgtgcgggtgacggtgctcacactttgcctccaaggagctcccaagtgggtactcctagcgtctttcccttgatgtccctgaaagaatcaaatcgtcctcaattctttcattctgaccgatttcatctctcgtcacggggtatcttaccatagggcgatatccaacccagacaaagcgctcatcaagacctctcctccacggtaaaacctgtgcctgtaggccgactggtagatgtcttcaatattggctgcgtcccatcctacgaatcgctcccgaaagtcgacgaaggcgccttcgacggcttccgagtgaccttcgagggtggcttcaccccatccgacgataccctgcgatttatcaaccgggtgtaggatcagccgcgtggtcccgtagaggatcacaaagtacgaagcggtcgcgtcggctcaccttggacgtctctacgcggacaaacaaccatcgagggcgcactcgaaaggtctcgatcttggtgatcctgttgatatcttggccgacctggagtcccttttcgtagacggtcgtggtcggggcatgatgcgtgctcttggcgacggtttcttgggtgagtagggtagccatggttgcaaaggtggagtaggttaatttgtatgatgaatcgtagtatgtcacagaataggatgtttcggaaactgacaacggctaatacgctgcgacgagattgatgacaccgtcgactgaccttttgatcagattttatgtgatagacaccacacctcacaactggccctctggtctccgattgtcggtatcccccctatttcggcaaacgacgggtttcagcttcgcgcatgtccccggaccggcatgacgccaattgccgagatgccgagagatgacgtgatcaagataattccccgaagtccgggcgcagtgcctgtttcgactgaaattcgccgattgccgtcttccgggccgatgggatgaatcgatcctatgccgacaattagcgagagcgagatccttgctcacagacaagtttcgatacatcaaccagctcctctatggccatagacgatctcgccttgcatttcggcgtgtcctcggttcccatattgcgacgattcacctcgacaccgactacagcgttcacgatgacgacccaaaagaacgatcctcgagactacctctctcatctcttctcgctctcgggcaagacggccctgatcacgggagccacccggggaatcggcgcctcaatggcccttgccttggcccgggcaggagctgacctcgtcctcgtccagcgttcgaccgagaacaaggagacgcacgatcagatcaaggcgttcgggcgcaaggtcgatatcgtcgtttgcgacctggctgacaaggcgcaggttggaggactcatcgccaaggtggtcggacagggacacactctggacatcgtcgtaaactgtgagagcgacgcctgttgatcggcaagaccttctcgtctgatcaatgtttcccctgcattcactcgccgacaggcggtgggatccagcgtagaacacccgccgaaaactttcccgacgaagattggaccgaagtcctgcaagtcaacctctcgacggtgttcaccatctcccgtgatgccggacggcacatgctagagtctcgtggaggggttactggaggcgccgccgtagaggacggtgcagctgacaagaacccgagggggaaggggtccattatcaacgttgccagtctcgtctccttccaaggtgagccaccccgccgtgctatctgtcctcatggtcccagcttctggctcgtcactcacattgacctctgttcatgttgctcactaggcggtctcacagtccccgcctacacagcagccaagcacggtgttctcggactcggcaaagcgctctctaacgaatgggcctctaagggcgtcaaggtcaacagcatcgccccagggtatatcgccacagagatgaataccgcgttaatcgggaacccagtgaggtcgaggcaaatcatggagaggattcctgccggacgatggggaagtcccgaagatttcgagggtgattatcttgattcgagcatctgccatgtctcttccggttgttcatgtgtgagactcgctgaatccgataccacgctgcatttccaccgcaggcgccgtcgtgttcttggctagccgggcgagcgattacgtcaacggagaatgtctcgtcgtggacggaggatggatgggtcgtaagtcctgtcttctgcggcagacaactcctatcgtcacttacattcgccatgcttctcccatactcagggtgatgggatagcatttcttagcatgcactgtacatattaccattcagacgaagattgtcatgacatgcacgaaaaaataaagaaaagggatttgagagaaagggatcgtcatggtctgaaatctaataaagtgtctattcagatcgtcgtatagtcgcagccatgggcacctgatcaaacctggatttgttaaaccgtaccggcgaatgcctatatatgaccccttacacctaatgtaccattcagcctgcgagcttgcatggcagctcgctgcgggatgcaaggcaatcagaactgtttgccccgttacgggaagctcagctgggttcttgaatgactaatggcgaggcgggttatcatacacccaatggggtttacgactatttttcaacagattgggatctaggacggatcccacaaagtacgtggcccaaggctgatgctgaagaacttgatcaatcatcccgtaggtgaagtaattaggtcatcgaaatgaaacggactcgacagtagagcagatggtccttttgtcatgcacaaggcaggatttttggtcatgatcgagccaaaatactgcaggtacatcccgtcgccatttacatcttggcccgtagggtgactcccaagcgaagtcactacaatcaagaaaagaaacgataatcaaggctctttaccaatgttatccgatcgataagttatcaggcagatctaactctccttgcaaattgtatctaaacctcacttcgttggacgaggcactataagatgattcagtccatccgcgaagtgtcgaggaatgagtggcgcggtactagccagaatatcgatggccttgcaacacaacagcacagaggaaacatgccagtacaggaggcgcaggtccttgcgtgtcattccgcttgaccgcaatgttttgtgaagggtatttatttatcttggaatgcatatgtgatcaaatcatcttatagcatagtagctaagtgatataagtaaagtgggagaactatagtattgtcagaaacgccaatcgatgatacatgagtatagttgttgtagaatcgggacgttgttcgctctcttgaggtaagcgcgtcaatctcacgcatgtctctcccgatactcatcgtgttttgcgatgtacaaaaacggattttgcgacgtcatggtgaacacaagagaagttgttcgatcgctctatcggcgcgtgttgaaagcgtccttcgctagggatgatctgcgactcgcgataccgactacagattatatacatgagacactccagaccactttgctaacccagattttcaactggaaagatgccggacattcatattcaatgccgtctcatgctggttggtcccattactgatattacattgcgagccgtctccatttgcgaagcgcgttcctgcgtgatcatcgttcgctatctatattgtttttttctgttctttccaacagagatacctattcgtagtccttgacaacctcggggtgcccgttcattcccttgatcgcctggaattcggtcttgtccggcaaatgtcccaacttcttttgagcttcgtaggtgtctgttcgagagatcagtcagtatggtagcatagctgtgtcaagagcgccaagactcacatcgatcgccgaatttccctagctgttgagccttgatttgaagggcaagtattttagagctcaatcgacaggcggaaagattgccgaccaagaagaaaaagttaggaattccgctctccctggcaactccccggatctccccctcctcatcgagcccccaaaccgggttgaacttttcggcccagtctccaccgatcgtctccctgatggtatcggggaatccagtgtagccggtcgcaaaaatgacgacatcgaaggcttccttggacccgtccttgaaggtgatctcgttggttcccttgccgaagctagcgatctcgccctgcttgaccttgatatctcccttgcatatcatctcggagccaccagtagaaaagtagtatccaccggccttctccaaggccactgttagtcgcgataacatgtctcagcgttctcgaactggtcgtcgtttttgaacttgacttataaaaaactcactcatcaagaatccagagccttcaggaccggcccaggccttgaacccagctttttccaatccgttcagaagctcgccatcgacctcggccagcttgggaatgattcgcttgtgatacagcttggcgacgagcttcgggttggactcggcgattctgtcggccaagtcggtgggaggggtgttctcgccgtacagaccgctgactagaaaagtcgaagatcatatggtttcagactcctgacctgcaattttcttcgagacaacgcaagactgacccatcatctccatacccttggagacagacatgacgaaagtcggcgaccgctgcagcatggtaacgttggcaccgttttgggcaaagtcgaccgagatctgggaaatagaatgataagggtctgcaccgacctccaggtagctttagaaggctctcagtagactcacatcgtgtccactagtacaggcaccgacgacgagcgccttcttgcccttccaatcggctccgcttccgtgtcgactcgagtgaacaaccttgcctccgaactcgtcctggccagggaaaggcgcgggcatcttgggctttcctcctcccaatccagttgccagcaccaagtgggaaattttcatctgtcgtcgcagttcctgaccgttgtactgcctgacgatcgtgacgttccatttgttctccttttcatcgaaccgagtctgagatgcgtcgagcgtggcttcgcaccagctgttgatctcgagcacatcgacgtaagcttccatgaaattggctagcttgccggcaggggtgaagataggccactgcaaatattcctcgtcatcagcggtcatcggaaaatggcgacatcgaggctgggagctcacgttcgaagggaaggggaagaagggcaagtgattggcataaacgggatcgctgtggttcgggtcgagacgatactatagtcagttgccgctccgagccgggccaaccgtttgatagacggtgactcactgcaacgacaaagacttgtatcgagttcgccagttgtcaccgactcgtttctgtcgatcgatcactagagtctgaacaccgagcgtgttgagctgagcagcggcagccaatccgttgtggcctcctccgactagcaacatcaagcaagattcgtcaacatgacacccatcagccgacttgtcgaggtacttactgatcaagacttcgggatcctggtccctgaactcgttctccattgctcgcttctcgtcataagagaccttgtcattgtggcttccgcgaggcctgtgagcgccgaccttttgggggaaaccatggataccctccaagagagtaaagcaggtgaacgccttccattccttatcctcgtaagagaggtgcgcaatgccggaacaagggccgagctcggtttcgaattggaaaaagagatcgatgaaagaaacgtcgtcaaagggttgagagagggcgggttcggtttcggcaaagacaaagttgcgagccttgactacagggaagcgagcctgggaaacgagaaggacgatcaggatttcttgcgaatgtctgcttatacgatcgcgcaaagcttaccttggcggcctctgcaatgttgttggttcgaatcgaacggtagtcgttgttgaaagcgataatgtctcgccagaatccgttcttaacgaaaagtccagcgaacaaatcggcattgttggtggtcgcagcaatctcgaactgggtgagccaatgctgcgcaatcgtctgaacctgatgttcgatgccggtctcgggttggaagccttccttgtgacaggggaggccttcgggcaaagcgaggtaggtagccattgtgtaagcgtaggtacgttgtttcccttgttcttgatcgacgggcagagaaggaagattcaggagactgagtaggaacggctgaccggtagcaaggtctttggtggtcgagcagaagacttggaggtgagtctttttatgggacatacgacctccatcgacctcggctcatcggatccaacacggatgttcagtttgaaagcaaaaggatcctgagccgagcgctgactgtcggtccacatgagcggctatcgattacctatcagccctgcggcccgtgaatagccacctggacccgtccgtaagcagatcgcttcctcataagcgcgagatatcatctgccgccgccagagtccggtcccgcccccgtgatcgcggcaccacctcgggcgggcggacgattccccgcacacacggctcagctgaacgataccgccagaaccgaccagttcggaggaccggctgtagaccgaatcacctcgttcgaacatgccgaccagggactactacaaagtcgctccagcaagctcgacacattgaggttcccgagtcgactggtcaaaccgcgcttctgttttccaaaagtaaatccctttgtgtaacaaccgatacccgccccaattctcccacccccttacacctcgcacgactcgatcgaaagaaccgaaatgaagatctcgaacaacctctttatcgttaccggaggagctggcggaattggaaaggctgtctcgtcgatcctgacctcgaagggagctctggtcgccttgttcgatgtgttagacagctcaaagggcaccgaggtagccaagtccatcggagacaaggctgtttacgtccaagtcgacattaccgagtcggacagcgtcaagaaggtaggtcgcagtcgtcgatggatggtggtcatcagagtccatcgcgcggttcctgatttgcacccatctttcgcgtgatcgcggtacctgttgatcagggaatcgagaccgctcagaagcactttgccgagcagctcgagtcgtctggcggaaagctctcgggatgtgtccactgcgctggtatcgccatcaagcaggaatggaccaacaacatggtcgacagcatccccaactttgaaaagatgctcaaggtcaacgtgagtcggctcgaatggcacgtcacccttggcggcacagtcggttaatcgccatccatcacatcatgacttcgtcagaccgtcggaacctttgtgatcaacgcccacgttgccgacgccatcaatgctcaataccccaaggccgagggtgaacgattctttacgaccgacgaagaacgtgggatcattgtcaactttgccagtgtcgctggacacgatctctacgccaggtgtctgagctacggacccaccaaggcggcggtcttgggaatgactcgaagtgggtcatcccatgacacaaagctcgccacgagtcacgcatattcacccatacgtctttgatcttttgcacgcaggctttgccgactttttgggaccttctggtattcgggtctgctccgtctcgccatcgatcgtcatctccggcttgactgctggattctcgggctacttccaggtgagtcgtgatcgatgatctgtttgcgctcgtggaacattgcactgacacgagccgctgcttttctaccctaggacgatctcaccgcccacgccgccttcccccgatcccctgtcccagccgacaagatcgttgacacggtggttcatctcatcgagaaccaatgtgagtcccgcgccgggtctacaaccttcgcttgccctattcgcccgactcatttcgaactcgacgaccgttggttccagggctcaacggggaagacatccgcgtcgacggaggttggcgattggtcaccaacagggccaaggacaaggccgacccccgagagttggctcccggtctcgagtaggaaaatccaaaagaatgtgaaacacccaccacagatagcatagtccggtcactagatgatgccttggggagcgaacgttcttggggagtttcctagatccgtagatcctgcgttccaggcgaggggcatcgtaatctcttcaggcacttctggcaaaaccgagcctcctcgtgctagcctgaacgagtccatcttgttgaaagctctaactgctgagcggtccgtgctagatgaatccctcttggtcttgtctcacatcccccgtccagtatgtgggtagactgacatctctccgtctttctctcgaaagaccagacaaacatctgacctcgtctccttttcaccatcccgctgtttttcgagccaacccaagacttgctgttcgaccctttcgggcgaattccgactttctacgacgagtaataagtggtcggggtgttgcctatcatcggaggtcacccggagcaaggtcccgccgagcgtcaatcgactgatcggcctgcagcaagatgcctgtctgatcttggtagctatagccccagggacgtctgcggtggccgtctcggggtagctggaacgaaggatggacccgctggctatttgatccgtctccggcgaagtaggggatgagatgttgtcggggaggacgatcatctcttgtccatcccgagggaagaccagcatctccgccgtcgtactaccgatcggaccgcttgccatgatgcgcttttcgacgagatcgacgtcgttccccttttctaccaagatcaacttgtacccaaactgcggtccatgggtccccgtccggtaataagagaacaagctagcgacgcctgtcatccttgatgtaatccctcttctccaggctttatcattccggctctcgaggtgcgctgccaaacccaagccaaaacccaagtcatctggaaaattgcaaatttcttccaagccggcgttaagagcgatgtgcgagatgaccgaatatgactctggccaaggtgggcaggaagagcaagtcgatttggtcgacgtggacccggaggacgaggcgggcgagctggatcgtgacatgtcgagtctggttcgacgggcagacccccaatcgcagctatatttgcagacggatggccacctctgacgacgtgcactgtgattgatccgacaaagtgtgtcacttaatcagaatcgattcacagctacactacgcactacactgtactttgcatttgcagggaaagtggcaacatggtcacgtgaatcgctagatcacccaaagggaaccgtaccatcataatgcaacatcggtcatcttgcatcttatcgatcgtccatcacagtatcatgggtcactctggcctcgctgctgatggacctacatgtaggtcaattcggattcgtacctggtctcggcgagagatcctccttaatcgcattcattatgatgatggagttctcggaaacgtccacgatgccacttttgcgagacatcgttttatacacagtcgtgagagatcgttcaacaggcaagcagctgtcagccgattctgctgcccatgtcgagcccgactacacctccttttcctcggcatctggccgactttgctcgtcacccagcttgcggtccctcagacaagctccgaaaaagatcaagaggaacccgacacaaagaccgacgatgcacaagatccgctggacgtgctggtacgcctggacgatggcttgtctctccggtgtgccccaggtgtaggtgacgatcgagccgtacggatcagcatagaccgctgcggcgatggcagggtcacctagttccctggtcaacctccccctgagcgtctgggtccagatggctcccgagatcgaggctgccaaggcggacccgatctgatatgtcgccagatagagacccgtcaccacggccacgtctgggacgaggcggcggacccgcgattcagacgacgcccgcttcgttctctcaatgacacttcagactcacgttcgtgcttggtctcggcctgcacactggcctgagtagggtaagtgaagaaccctccagcgaaacccaacaagacctgcccggcgatgactccagcgtagctcgattctccaccccggtacctgaccatcaacccgagcgcgatgggccacacgcagacaccaaagaggatgaacatcttgagtctcctgactttgtaaacgacgagaccgagtagggtgcccgtgatggtcgaggtgaacgagtagagggattggatgcgttgtgacgatttgaccgactcgcccacggcgacttgtagcacggcgtataggtaatcggcctgcattccccaggctacgatgtttcgagaattgatcagcatgcagtccgggacgcagccaaggcccactcgataagacttacaaaagttgagcgtgcaggcgattccgaaagcggcccatacgcctcggcctttgagcaactgacgagggacttcatcgttagtctcgctggtaaaagaaagtggagcgatctcgattcaccttgaagggaatcataggatgcggcgctttgacctcccagatgatccaggccggaatgcagagcacgcctacgatgagaggcgccaggatatccccatcgcgccacctgaactgatcctcggtcccgcccgccaatgtcaacggggtcaggatcaacccaaacacggcgatgatgaggacgatcccgatgacgtccagctgccagaagagggagacgagcagtcgtttccagccgagcagttgaaacggcgatcgataggcttcaagggctccggctcgtttggctcgccattgagcgacgacgaggatggcgacaagcgggagggtcgagaccgggtagactacgagttccggtccgtccaacgtcagtctctcatccaaggtcgtcgatattagcgagaagcggactgactgattgcccacatccagatcccaggcctccagctaccatcctcggtcggatcgttggacaagaccgctgccgagacgtctccactgacccaggtattgatctgtccggtacaccgtcaacgtcaaccgggccctacagccagccctcaccaacgggctcgtatatcctcacgataaagggtaaggcagggacaaagctgaaaaagagcctcgatctcaaggaggtcaggtcggcgatgatgacctgaggcgtgagcatccgacgcgggacgatggtcagcccaagctgactagctatccatcacggtggacctggtgactcgcctcgacaagcaggatgatcatcgtatacccgatctacaaggtatcgaatgacagagaagctattgctcagtctcggatctcctgtgcgggtcgatgaatggtcttacctggtaaatgaccgcgccggcacaaaacgtctgcacattatccgaaaccgactccacgatcgttcctagtgagcgagatgattgggcatcacattagcgtccaggtcatcaaagacctgtcggtagggtggcggcggatagcaaaggggcagggacactatgactcaccgacgacgtagaagacgatcgagacgaggatcaactctgtccgtccgaacacatccgatatcttggcagccgtgggctggtccgtaccgtgtccagttcgttcgattgggtcacgagtttaacgtacgatgtgagggtgacgagaggtgagatgtagatcagtcacggagtgaagacattgtcgaactccctgtccgggtccggactcacctgtgctgcggccccaatgacgctccgaacgaccgtgatcgtggacaacaacgagtgctgggcatacgaagccgtcgcgtatccttggtaggtgtaacgaactgcgggtcggtatgggcaatgcggtggttggtgtcaatatcagttcttccagataagccgagccctcgtgaagtctggactcccggaggatccgtatgacgctcggactcacctgtcccgtccagtccatagacgtatgtgaccagaaacactccaaagaacaaggcccacctctcccacgtcttgagatgcgcgttgatggattccatcctccttactccgggggatagaccaccagagaggatgatcctcgcgtccccctcggccgtatagctcgtctctttctcgtccctatccttttcatcttgcgtgagcgagccttgagagctaggttgacggtggaagaggtgtcggatccggtccatcggtgcggtctatttgaataggtcggtcgtggttgtgtaacggatggatcgactcgactcgtccctcgataatcgacattttcttgcgagttcgcatgacagacgtcagcaaagagaaggaaggcaggctatatattccccaggaccttccttcggccgaatgcggagcggcttgtacctatgctaatcagataaagaaaagcaaaaagagatggaaagccgacgtcagccatagctcatcgccctgtgacgggccaactgcgacgcccacgtgaaggagcactgtaaacccaaaaacgacgttgatccgcctgtacacgagctgggtcgaccttgaggctgctcctggcgtcgctgttaaccggtagaggtaccaactctctacatgaaccggtcgacaagcgccacgatgatgacgagtctcctcgtgggcatatccgaaaaacaaggttcacccgatccaaagaatcacagatcacgtgaaacgaagtgaaggctcgtgaaacgtgcccaaggagactcttgttgttcaattcaaggcatgttgctgatgacaggatttgtcccaggctgtccaagagaaaaggttgttagcggtcgcaagacagcgataatcgagttcctatcgagccgggttgattgcccagcgagccgtgtgacatccagacctctcacatgctcttgttcagtcttggtatacgatcattttgctatacgttgatacaaagttgactcgatttttcggctcggtggctcgacagcaaaaacgacatattcctactagtaatatctcaatcacgcccgataagaccctcctcttactccccggcagcagcctttcgagcgtccctggccaacttccacttgagcgcaaagacgacaccaccgccggcagcgatcaaggcggtcgtcgtggcgaatcccggttggtacaggggagcgtccgatttgggccagatgaaagatccgtagacggaagccaggttacctacgaacgcgacatcaaggcgtgagtatggctggatgggatgggcggagagactcgacgtgacgatacttaccgaatccgttgatcatggcgatcgaaaccgctcgcttctcacggccctcaaagttaccgaccatccaactcaggaacaaaggtacggcggtccagataccggctcctccgaaacagatgaacgcgtacctgacagcggcctttttcactacggcggtgacaacgaacgaggcggctccgaggatacaggcggcaaagatgtgccacgccttttggttggttcgatcggcgttccaacccatggccaaggaaatggtcaaggagacgacgtagatggggacggtcatgactgcaaggtggccgcgagcgcatgagcgacggttccagaccaattcaatagggtcatctccactcacactgggcgtctcgtcccttgtagccgagagtggtcatgagggtcgggaaaaagtaggaaatggtacttcggatccccgtcaagtcagatcagctttattgaaccctactgtgcctcattagtcagcccgactcacccggatccgttaagcaagacgtaaacgagcatgaaggcctgcaagtgaatttcaaatgtcagcgccctggccaagataaacacgtccagccgagtcgtcacccacccaagtcttccaatccttgacagaagccttgaacgcctgcatgtgtccaagtcgatcggcggcgtcttcattggtgaccaatcgggcgacggcaaacttcttttcacgttcagacaaccatcgggtggtgctggggtaatctgtgaggtcgtgcgtgcgaaaggcagttgtgagctgcatgcctcgagtgaagagacgatcgtgtaaaggggactgaccgggcaagatgaacacggcgatcccggagatgacgactgtacccagaccttcgatgacgaacaactagaagcgcccgccgagtcatcagctgccatgcctgacgcgatcgtatggcccagcaggggtgtccaaactcacccattgccaaccgggagtgttcccgacaccatccatgtactgggtgatcacgcccgccaacaatcctccgaacgctcccgccatcaaagcggccgagtagaacagggccaaccgtttcgagagctcgttcggctagtgattcaagcgcagggttcaaagcaggagcgggacatcagctcgaaattccactttcagcggtctccctggactgaccttgtaccaacacgagagcaagagaatgactcctgggaagaaaccagcctcgacgatcccgagcatgaatcgaaaggcgacgagaccggccaaattgtgaatccccttggcaccgatagacatacatccctgcgtggaccccgtgggacgttagctcatctcggtgagggggaacgtactccagggcaaacaggagcgagactcacccaagtgaacatcagggcgggaaggaagagactcgggcgggatcgagcgagcagcatgttggaagggacttctgcgaggaggtacccctttatgcagtaacgggtcgttcagagaacatcagcaggaggtcatatggaagtagccgcgggggataaggcactcacgacaaagaagatggacagggcgagcgagtagtcggacgagctcaagctgagatctcgttccattccaccgacacgagcgttctatggcgcggcgaacgatttctcgtcagccccgatcgtcctttcatgtgtgacgacgctatcactcactccgatattggttcggtcgatatagttgaaaatgtacatcaaccacaggataggcaacaacctcttgtccacctttctgacgagcgccttttcttcggcagtgccggggacatattggatgacgtcttcctggtcgatcgagccaccttcgtggtgctcgaacgtgttcttcttgtcgacgtcgaggtgatccattgtgtagatagtatcgcccggcttgatgtcaagatacgggatatttgaggacgggaaggggacggttgtttggcatgacgggcaaggtggccaaaaaggtcggtcatgctatatagtattgggagaccggggtctccggcgggtcgacgaggcggtgatggttccgggactacgaccacgatcaagacggtatgatgatacaccccgattccgttcccctccacttgccgctgcaccgctgaaagatcgtcttctaatgaggcacgaagggtgaatgtgtgagattagccatgtcgtggtctgcgcagaacctggagggattcggtttgtgtcagctgagcggtgccaagtcggtggagctccacgatcctttagcgcgctacgtgggcctgctgctggacgggtcgacccagagctcgggtacttttttcttcctgcaagccattgccattgctgctgggagccctgaattggaaatgtgatcaagtatcgtgagccgcggggtgttttccgcctgtactgtggcagtcgatcgggttttcatttcgcacatcgcggtccgaagtcataccgcaccaggtgaatgaggtcggtgttgggacgcgcgatagtcaacaacgccgggagttgatcgaggtcgcgattcgtatactctagccggagagatgctagatcacccatttcacaatgggtctacaatgagggtcctgatatcagaagaggctattacgtatcaccgaatctgtgccgcgccagctggacgatacaatgacgatcaccaaataaggtcaacgccttgatgggtgaaacaagtcggggctcccttgtaacctctcggaccggaaacgccgatatcgcttgctcggttatcgacccgcgatccgaccgaatgtcaccgtaagacgatcggatatcgaattacgagccaccgcagcgaccccctacgaaggtcctttttcaaagcatcaaaggctcgatcgagggtccggggctcctcgtgcgagagatcttcgactttccttaggggcggagttggttatacagccgagacgtcggaaagccacccgaccccgcccgacctgaaacggggggaagcggtagaatctcagagcctaactgagggagaacgtcgatcgcatatcgatccggcaaacaagattgggcactgaaactatcgagcattttgtgaagcttggcagctttgtcaggatgtacgggcggaccggttcagcatgttcttaatctcctccatcaggcgacccgagcccggacgcaactgggatccagcagcggattcgagcctacattcatagatgcatcctgctcgactgctcgcgcgtccggtccgtccaaaatcgctggggatggccaaggcaacaatgaggtacattgaaacaagcacgaagtcacaggaaggtcgcggaccttcgctaaaaggtgccgctctgacgttgttatacgccgacttctcccacctgttcgagaccgatgagaactgtatgatcgcccctggctagaatgacattctagctgcgacgggtccatctcacggagatttttctcgtaggtaccaggcacgagactttgttcgacaacagcggagagacgattcgcgacacgctctttcaacgagctttactgcgagaagtgttcgaaccagcgaataccttctcgctgagcaacgagccgcctacttgtcaatcattgactgtcaaccagtggcaatttttccggtttcatgggcaagcgtgaccggttgcgcaaggaatcttgcatcacgcaagacccgccagggatgaccatcatgaccagagggatcaacctcgtaaccccatcaccaagtggctgcgccagcggacttctggcgctaaatgcgagagatgcgccagacctctcgacaccattcaggcccgctcgatgttgtcctcaagggtcaatgtccgctcacgtgtgacctcgttcagcgatccgagaggactttttggatcttctcggaggaccctggtcgagcaatatctcgatggatgaggtcggacgtgtgttcaagttttactcaagaagattgaccggtcgtgtatctagagggaggcgactcgcatacgattgtgtgagaccaagatcatgtccgccgagcttcgacttggtgatctgaagaaataggcatgggatcggcttcaaaaagagttccgttcttctaccgcctcgctgaaagtggacgggggttagaggtacgctcaatcgtattagatatctaggctattgggtcccatcacaatgatcacagcctgacttgactcctttagaggacgcatctcatgcacctacttcccgacctcccactatgatcatgcccgttcttcaggcggcgtccatacagcccaaacgagcacacaaagtgccattcggcctgcggccaacgcgaccgcaatctttcggaatccgtaatactggggctactttggacctgctgtctcatctagtaccctcgttacctgtcgggcgcatgtcggtcggacgcatgtcgatactccaggcggcgactgaggggctaaagggctgagattgtatccctgattcattgctgtgcacactgacgggacccccgaggtagagagtgacgtggcgggtttcggtgtgatctggtcattttcgagcgacgtcgtcttggtacttctagctggtgatagtaatcggtcgtgacacggtatcctacatcttcttttgtggtatatgacacgagccgtcgtcacatcacctcgttgtgatgatcgctcaagcttgcgacgacggctcaagaacattggacgttcattggataatccagtcaataccctacaaagggtggaggtcgtcacgatcgtcgtgtgtcgatttctttcccagctcctctcgtcggggaattgctacggctactcggaaaggcctttcaatagcacccgccgacgcctctggaaaccgccgctggtagggctgaacattttcgaatcacactttcactgatccggatcaaggggttttcgggaatcaacttgcaacacgctgtaagtatgttctactgcaggggtaggtatcctgcactcgccaacatggtgacgaacctaagctttggtggtcatgggatcgaccgtgggtccagatatagagcggagtctcatcagtcagtactgttgcccagctcgatcaacgggcctgcgccaaataatgtcggcgacggtctgctcttcgattcgaagtcgagcgaattgctcgattgggacctagacaatcgataccgtaacgtctccacaagttctcaagtgtaactttcccttacatgcgctggacttccctgctacaatcgcctgcaggactgcgtccactcgtcaagaggctccctgatttggcgggcaccaaggccgagctgaaagacgtcttcataggttaatcgcccccgatcgtctatctcgcaatgactggacagacgctggatgacaccgacgagcgtccgttggctcaccatctcgggcaacacttgaccttctagctttaagacgcccgaccgatcgatacggtgtcctccgaggcaatgccttcccgtcccattggcagctcgtagatatggtcgctggatcatgtgagattgggaacatcgatagatacctttgtgactacctctactttacatgctccactcacaatcgctcacgcacgacaaccacattttcctctttacatctctcggtacctcgtccttttcactatcttgccagtcaagctcttatgggttatcctgaccaagagaacattcgcgcggtgcggtaccaagccttgatcgactaaattgcagcaacccggacgtgtcccaaggctgtacccaatcggtagtcatgcgatagcaaggatccctctcctctcgccttgttctgagggggagcctttttgaccgaaaagacgttagtattggctgtcagacgccgagttcagtgtgtggtgtgtgggcgcagggagtctgatgcgtggtctccgccttgaggactatgggggcctaacccctaacccctaacccctaaccctggacaggattatgagggtctgcacttaaccgagctagtctcgaaaaaagttgtgccatcaacgcttcatacaacatgatcaacttacctcgtgtcgaatcccagcaagtggcatctacggtgctaagaaccagcgagggtgaatgacggccttaagtcacggagccttcgcattaggagaatctgcccgaaatcgccaggacagggattcccaatatcgagacaaaagcgtggtctggcaaccagaagggccacagcttcctgctcagttgaacttcgcgcttcggcagactcgaactgagatctgtctcgtcgtaaccccacgagcgggtcataaagacacgtgcatcgcgatggctgcacatgatccgcactcgacaatgctacgagaatgtttcatatcacgacgtctgttgaaaccatgtctcatactacgtacccaagtctgtgcacagtaccgaaatctatgctgcgagacatcatcgcgtccccctcttcccctatagtactgcgctagacatatcctagatcggctcgtctcgcggctcaatcaacacttcgttgatagcaacgtgctctggctggcaaactgcgtagacgatggacctggccacatcctcggggtccagaacccgcgctccggtcggttctccatattttttgatggcctcggcgtcggtcgacatgcccaacagttcggtggccgtattgcccggttgaatcgaagtgacgcgcagtcctgtaccggccgtctctactcgcaaggcctgcagcgtcgcctcgacaaagaacttgctggcagagtagactccgagtccgggaaagaccttgcgaccggcgtccgacgagatggcgacaatgtgaccggtcccgcggctgaccatggcgggcacgagcgaggacaggcaatgcaagagtcccttgcagttgacgtcgacagtacgttcccactcgtccgtttgcacatttgccatcatggtaaagtacatgaccccagcgcagttgacgagaatgtcgacgggaccgagctccttgttgacgcgagcgatgagttgttccacttgctgcttgctggtaacgtcagtgccttgaatgagcactcgaccgcccgagccggtagcagcgatcttacgcttcacgccctcgagcgcatccgtacgtcgtgcagcgagaacgacgtgagcgccctcggtggccagaccgacggcggtggcggcaccgattccagatgacgctccgacgatgacagccaccttgcccgcgagacgtcccttgaaagtaaccgccttgcgacccgcgccattggtgctggatcgacgaggaggacgagcaagccagcctcgagcgaaaaagtgtcgcatatacgtctccaacagcgcgctgtcgatcgccggacgatgcacgccatacagcgccaatgcagcgcgagtaacgtcatccttgagcaccgtcactgacctcagtccctcgaccgtcggcatgcctccgcgcaaaatgtcgactgtgaaaggctcgtcccgcaccttgccattacctcgcttttcggtccatagcgccacccagtcgtcccacggcagtcgagtcgtggcgtaacccaactcttcgagcgagtcgaacagtccaccggccgacaccgggtttgaatcgcccaagtggtacacgagctgatccgattcggtatgatcagcaagcgtgacgatggcctcggtgacaaaatcggccggcgtcatctcggcaaaccatccatcgatagacggcgcacaccctagctgcaatgactcgacgatgagggcattgagcaaatcatacgtgttggtcgacccggtcacgctgtgtccactgatggttcccggtcggtagatcttgacgggcatacctctacgcttcgcttcgcacacaagcatctcggcaacccattttgtctgtccatacccgtcaaggagcttgtccgggacgtcctcgagttcgaccatcgagtcttcggcccagccttccaacgagggcacaagcacaccattcgtagagatgtgatgcaacgtcgcgccgctgatcgaggccaaacgcaaaatctctcgagtccctccgacgttggcgtttcgcagagcggcgtaagggtagaccaggttgacggtagcagcggcgtgaatgatgacttggattcgcgacgccatctcctcgaatgttccactggaaagaccgagtcgcttgccggacaagttccctggaagcacttccatccgatccagcatcacgtcatcccagagtcccaagtcgaccaagttctttcgaatacgagcgaatcccgcaggtcgacaatcgtccgacggatctgtgaacctgaccaagcagacgatggtagctgaagtgtgttgtatgagcgacttgagcaggaaggcccccaagtatcccgtggcgccggtcaggagcacggtctcagcgtcgcttaattgtcgcatgggcgtgccgttcgacgtaatgtccgtgtcgagctcgatatcagcagcgagcacggcaggtaggtcagactgtaccgcagccgtgtgaccatcacgagcgtctcgaatgacttgcatatggccttgcaacgtgggcgtccctgcgagcggagccaaggggaccgcaaatccaaactctttcgtgaaacggttggccagcacagccaacaccaaggagtgccccccgagatcgaaaaagtcgtgctcctctttgatcgcgccgacgggcatgttgagtacgtcggcccagagccgcatgatggcctcgatcttgacctcggtgttggcttccttttcgacattgctcatcggcgtcctaggcgaaggtggaggaggcaaggccttgagatcgatcttgcccgacacgccgtgggtaggcaagacgtccatctcgacccagagcgccgggatcatgtacagggcaaggtgcgacgccaaagctcgtcgagcggccgggctgatccccgattcgtcaatgacgaggtcggcacgatcgcgctggtcatcctcgtcccggacgacgtaggcgaccagttgcctctcaaggccatcgccccacgcggtcacggcacagtcccgcacggcgaggtgcttgacgatggccgtctccacggcaccaggctgcaccgtgtatccccgggtcttgatcataccgccagctcgaccagtaatttccaacaaacccgaaggcaagagcctggccaagtctccggtcttgtacatccgtgcgccctccttatcgacgaagggatccggggtgaacgccttggccgtggtctcgggcaggttgatgtaacccctcgccaacaagtccccgccgacgtacaattcgcccgcgacgttgctgccgacccggttccccgactcgtccaggatgtagacgtgttctgggtcgatgggtggtccgacggggcacacccgggtctcgtagtcgacaaacgtacggatatccccagcagccacctcatgcgtctcgctcgcactgtagacatttaacaggcgagtctcgggcaacgccttgacggctcgtcgacatagatccgtcgtaactacctcgccgttgagccagagcgaccgcaagtcggggacctgttgatgcagatctggataacgggatagcacggtcgaaagcagcgtcggggtcatgagggtatcggtgatgcgcctcgatgcgagcatgctcacgagcgccgtcgggtcgtagcttgccttgtccggaatggcgaccacggtagcacctcgcagcaacggcctcagcatttcccagacaaagaacacgttgcaagcgacccgatcgttgggagaaaggtcggagagttggaaacgtagatcgtacgagagtactgctgcacgatgaggattggcgattcctttgggctgacccgtggttccggacgagtacgagacgaacgcaagccgatcgagatcggtatcggcgggcaaaggaggtaaggttgcatcgctcatcacgccgtttgccttggcatagcctcctgcctcatcgatggccaccacaggaacgtccgacttgatgtgctcaacgtgtgctgtctgtgtcaagacgacggcgggcttggcgtcatccactacgtcccgcaagagacccgaagggtaggcgagttcgagcaccaagaaggctcctcctgcacgtagagccgcgagcgacgcgacgacatagtcggcactgcggttcatgagaattccaacgaggctatcccggcctaccccatgatgtcgtcgaatgtagtcggtgagggcctcggtctccttgtccaactgggcgtatgtcaacgaccgcgtctcatcttcaagggcgacgagatccggggtcaacttggcctgagcgacgaacaaggcggccaggtcttttgtgatgtctattcgagacatgtcgaagagcagttatgaccggaagaggaggaggttgggggcgactgaaggctcatatatttagctcataacctcttgatgaagctcgcacactcacttactactggtcgtgacgctgtgcgtcttttgtgggaatggcggaagcggaaccggaaggacagagcgtgcgaggtctggaagacgtcgtcagaaggtcgagggtgattggaatgaatgccgaacgggagtccggttgatctaaagtgccttagtgacacgatttactattgaccatgacgtcctgaccgctgtggggtacggcgcggtctcgtccgtgtcgctcgagctcgacaacgataatcccagttgaaaacacgtcattcgagtgtcatttgactcgagctgatatcaaaagaagggtatggcctttgctcacggctatcgtcgagatgaaacgagagcgagatgtggcgaccatgatgagttcctagaagctgtgtacaacgtaagatccttatgtatggtaaagagctgtaactgcactcaacccgtttaaagctccagaagcgcggcaagattgacgtcgacgtttccttgtcaacaaagagcagctgctgtgcaacggcaccttgttaacatcctcttacgcagtctatttttgcgctcagattatagcaactggggcgctcctgggtacaggcactggtagagcaacgacatgttgacaacgtacggcatcgagtctgggcagcactacgctgctagggcatcgtcgatcccatgacagtcgcacccttctggaacgcaagacggaaggatttgacaatcgatccactttctacccagcagcctgcacaagcacgccgcaaggttgtttacagctaccgattcctgccccgtaggccagcgccgatgccgacaaacgctctcagaccgataacgtggtaatccaataccacttctcaatgttcgcagcaacgcgccactgagaggcatgcctaacaggcctccgattgacatgctgaagcaagtcataccattccttgcttgcgccaagcgtcgaggtgtgtccccgctgagccgaagaggccgtcgtgagcgataccgtgcgacagttaccgagagcgaagcagtgaaacagggaaatggcggcaaatccctagtgcttccgatagtggataattcggaaggcagtacgtcagatacgacgggcagagtgtggatctgaaccttgacaaagcggttcatcagatcacgcggaacaaggcggtcgcttagtgttgtagtaggctccgtgactcaggccatgataatgccctggactagacagcattgatagtactagtacaaagatcgcagaggatttgcataacgatcatcagggaagcccagctggagatcggttcatacatcaccccaaacagacatttgtcttaatcacggttgctggcgagtagacaacacgaagtacagaaggaccgatccgaaaaaaactcgcttgggctgcggtcgaaaaatatctacttgacatgatgagggcggttgatgatagtctaaaatctctcatcattcgctgatgaacgctcatttaatgcagagacatccatctcttgaatactgaaatccagacgttcattacgatcggaaggattcgcttcatctgtatggaaagtcagtgaccgatgctcatgcatggttcactttgctcctgtcagcgatgcgtatagttttgctccggcggagtcgacggagggtttagcgcattggtagtatccacgagttgcgtaatatcttggtagacgctagtcctctgtcattgccaggcctcgttagcaaagtcagcattcacgatattggacgcatctatgagcttgatatacaatacacctgagaagccccacaatttggagcgataagcgactggagccagacctaaccaatgtacgtcgcggcctcgcgatcctcgctcatgagtcttgcccattctaacgacaatctatacatgtacgcctgcgagaatggtctattcgttaattcctggtaaaacgcgccgacctcgggaggaaacctacagcatgctgctcccacatcccgtgctcttcgacccactgcttgccccttgatgaaacctgacgcaactcgtcgtcgtgcgcctcgatcgagccgctaggtgttccgaaatagtacgctaggatcgagtaaagctcatcgtagccgtaagatagcggaatgtagtggtaccaaggcacgagccagtcactgatggcctcatctagatagaagcgcggatatacgtcgcatcagccatacatcaggccctcgtcgttctcaaactcacgaaatacggtcgacttcagcacggcaccaggcgctttgagcagctctcggtaacgtgccgaccagccccatccatccatatcgagcagcattttaaactgatccctttcgtctcgacccaaatgcggccatagcgggtacgccgcagtcagagcctgcgccgtcttcgatttgccaagaccgtttttcaagctatgtgccgagggtccgatatcgacccagaatgcgttggcaacagcacttggaagactgctaagagacattctaccattaatcgcgttgtcgacaaacaacgagatgcgttcaaacttttgggagacgagtttccacatcctgaagcggtgggcagcagcgacatgggcgtcatcccggacgtcgataccagtcaaagctccacgccctgaacatcaattttgcggtcaggagcaaattcgagataacacgcaaaggaaggtcgacttgcagttcactcggggatcgagctgattccagtcagcgactgtagcattgctatggtcaaatcggtaactgtggtcccgagcaatgtttcgatcgagttcggtcagatgttgctggcgatacctttcgggatagtccagtcgcagagctcacgttgttggtatcgaaatgtcggcactctctaaatatcgtgaccacgaaaagactgatgatggaaggagaaatcagacacgtaaagcatgcacggccggccggaagcccgtacgagggtaaagccttccccctttcaaaggcaagtgcatgtctggaaagacgaaatttccgtgcgtgtggtgcagtcgaggattgctgcaagcgctcatttgccgcttcatgtcgaaaacgaatcctcctttatccgctggcagcctccacaaatgatcgcctgccgagaggtccgtgacgatcaattctcctgtgggatccgcttccagctgcaaggcaggcgaccctggagggcaagcctgcgagttcatcttcgtcaatcatcggaaagattcgagcaaggccataggacttggacgcactgagcgcaattcttcaaagccatagtgaggcttcgctcccggaggttgtagtagtagttcatcgctgtccgaagcgtctgtagcgaatcctttcatcagctgggctctcatttgcatcacatgatggctcacattcccccacttccgcagcttgaatcaaccgctcgcgctcatcccgcgaaacgtagatgagaggcagatcgaaaaggttgaacaccatgtcgagatcaggcaatagatgagcgatgccgtcgaatatcttgtgataattcttgttgtcgggcctggcaggcacggatgtcagcatgcgtccgaatgcctcgatcaggctcgccctcgaatactgaccactttttcgaactcgctttgccaggcatgtcatcaactacgccattcctgatggttacccacatcaaacgatccgaatcgctgagatccagcagttcctggcgtcgagagtcgatttgcgagggcgagagaccccagaaaggtgccagatccctagcgatggctagataaaaaatgccgttttagcccgccctactcgggccggtcgccaagactgagcgaatccactcactgtcaaactcttcgcagcgtcaattacggccttcgaagtcagtacgagccgatattcgtagccaaagcttttcacctcgactcaccgtctgccagttgtagcccgtgttgaacagaccattcgaacctttcagatacgtatcaggtcgagtagcgatgactagcccgatcgtcgacgtaccacatgtcaaaccccctcggcggccgacggccgtatcgcctcttgtactcgctcacggcctgttgcaacgtcttgctttgcttatctagcatattttgccaatcttgctcggctctctgcgtcagaagcgtgatgggatggacatcgggccgctttttgatgattgaagtgacatccgccgatgctgtgttcctagggaatgccacaagccaagtcccagccaccagcctaacatgcgacgcaatcaatacccgctcgcaggagaaaggttttctgatagcttacatgaggatcaatcctaacatgggcgccctgctactctgtttgcctagcatagctcgacgcgaacccagcgtgaccatgatgttcgagatggactagagtggagtttcgagatcttttcgcagacgctaatgaacggcgtaaggccattgcgacaacctcatgcatttcgaggaaacccatcgacagacgtccgaactatttgagctggacggtggaccatctgaccgagatgtgtgatttgctagccagttttgcgatagtatccggatagactgcatgccgcatcataatttgaacctagatcgatcccggtgtcgagagtctcgggccgcaccccggaagcgaaccagtctagcttggagttgcgtggcaacggcgggcgcgactgggttttgggtccgaggaacctcgatcaaatccgcgccgatgtctcggaaaggtaccaacgtcttagccccacatacccccgcttctgaaagcagttctccggccctcagcatgaccccttgaatggttccatcgtctctttcgatccggttacggagagccattcgattattagcttcgctggtcggttgggttatcgtgtcatgcagatcgctcatgcaagatgtcctgtatcgatgcgtacaatgctactctagtctacacgcctataaagagtactttctctcgactatctcagctacgacctcggcgacaaactcgccatcacactgcgaaatagaagattagacgattcctatcatgcagtgatacgtaatagccaccgagcgtaccctgatattgtcgccatgaaactccttggtctgaccctgtaggtcatgatagacatgaacgggatactcttggcagtcggaagatactggtcgtgacctactactgtctcccatttcgcctcgttgatataccacctgtgatttctagtcttggttgcccttctcaagatcatttccctttgaacagcgacttactgatcacgtgtgaatagcacatcgttgtgcacggtttgatgttcgtggtccatcagctctgatagaatctcgtaatcctgacggtaatgagaaacaataaattactggcccaggatagacacactacgaggcagacgctcacccgtgtaaaccctccagcgtccatgatctgtgccggaccgcgcggccttagatcgaaaatcaactgttacagagcccagcaaaatgcactgacctcgatcacattactaccgggctgttgccacatttgatgagagagcccattgccgtgaatcccgatgagaatctgcggggtatgtttggatcagtgaagcaatcgaggaacaggtcatttcgtgacctcacgtctgttcgagctgccagccgaaactaatcgactgcgacctgtcagcgccttgatccacatcggggtcgcatcttggtcgactcgcctgttccggcctatccatattttccattatggcgtggataaactctataccgcttcgatcagcgagcgaacgcaacgccgccaccagcgaagcgtcatcagctggaaacatttttctgtgtgccgcagtctgccttacagcggcaaagcaagaaaatctcagccgaataagagggtatcacatacgctgagactaacctggaaacataggtgactacgactttggtgcctttctcacgtcgcccaagcaattcgggcgaattgatagcatgaaagaggttggaccggatcggctcccaccaatctttcggtgcatcgatgttgggtaattcggctgccatcttgttccaagctctagccagaggtgatgttcgcgaggccgaaaaacgctaacatcgttacagcaatttcagcatgccttccggtgcatcaagatcaggaacgacaactaacatctagcaacacaatctgtacaagcatgagcaagacgggaaaacgttagatctcactcgccctcatcgatatgcgaacttgcctggtcaaaaacgtgcaagctcccggaccgggctctatcttcgaagacggtatactcctcgatcgcggtcattggcaggatggtgtttaaaaaccatgtactcaaacctgccacctcgattgatcagctcgacttcgccattagctcgcgtcgctcccgttgagctcacctgcatgatctcgctgcgtcaaacgataccacgacgtctcaaaaccatgaattatctggataggctaagagatttcgctcacccaatgtttcggctgggcatgcccaaaggcaattctcgagggaaatgccatcccccgaacagttcggaatccgttctgctcggcgtgaaccttggcgagcaatcgccatgctcccacgaaagattcggcgactggagatgcgataatgatatctagtatctggtaaagtacgtgctaggtggttaaactcactgactagttcgcaagggattggttattccttgattagtaacgccaacgacattctcgtgcgggttctcaaagctcacgatgaaagtagtgatccaaaaaactagacatgttgcggggaggccccgattcttcgtcattgaaaaatatctgagcggtgatacgaacagcttctcaatgagacatctcatcggtaatgcaggtatcactcactgtggtgccacctatgcgaatcgaagtccgctcgccgaacagctctcgagcctcatccagagacagagtcaggaacctggtgtcatcagcaggctcccgcttgcccgttcgattgtctggtttcagtgacaacaatgaagccttcgaggggaaagtggcgttattctcggtaatcgcatagaacgtccctttccacaagtagagatcgcggaaaagatctacgtcgtccatgtgacgatcgtgtcaaccgcgactctcaggtcttctgacatctgctgtcttgcagatgttagcttgctcactgtaacctggaaccccatcaatccactcggtaggtgcctcttcatatggcctgtagagattgtgaccatacgtccagtccgacgatcgtgtcgtgtgtgagctttgcgttgggatctgctagcaacgctcaatggtgacccgattaagacgacactagcgtatcgaaaacgacggacctaccagatcctttgtcgatcgccagagtacagctgtcacgtaggcgaccagggcagcgaaagctatcttacggaactgcctgatccgcttcgtgccaaacgagtccgccaatttcgtttcgaacattgtccttgaatcgatctgtcaggtaacgcggtcgagtcagacgtagtacatagatgcgagagatgatcttgacatcgaacgtcgatgcacagacttgttctcactcaatgggctataatcggtaacgtgcggctcgcacgcaagcacctaacccctaagaaacgatggatcaagtccccctctgactccgaaaggttcagtcgcgcatgactgtctcgggccacggaaacagatgaataccgcccgctgatcggcccgttcgcaattggctccgacgttcgaagtgcgatcaagcggttacatcagatctcaacaagtttctgacaaatcgcgtgtaccggccggcaaggtcaccattacgacgatgaacgctaattcacgcagtgctctccgattccccctgggctacctattacaatgttaatcttgatacgggagtaaggtgagaattgcaggcggtttcgacaacactccatgttatcttatcgggtaagccctccccggagacgcgttgactggttgcagcaacgcatactcggcgatggggcgtggcatgtcggtatggcatgtcacgcgtgtgccagatagttcaagctgctgtgctggatcatcacatggatactgggaggcgaccgcctttgtaaatcgtcaagacgccgactctctcggatggcctgcgcgaaacgcagctttaaagcttccaatagctgattaaagccctgtccaatcctctctcatctcgaggtctacgccacgatcgcgatagtcagtgcaaatcgattttgatatagatataaattatgaccagcttacctagaatggccgtcgggcaaagttcaaagtaatcttgctgagatccgtcgtgcgcaaatctgatcgatttgccctccaatcgatccaggacaatcctgcggaaacgctggtccgccttcgtccaccataacatccctcgatcccatagatgatccatccatcctttacttcccgcatcgttgaagtgtagtgctacaggtatttgacccgtcttgagatgccacatcatcgggggtagcaggtcggtcggaataatgtcgtaatcggccgatcccgctttcagatccaggttgacgcggtccgccgtattcataaatatggcagacgacagatcgttcgagtcggcccaaaacatcctgccccagtagtcgacagagatccggcggtctcgtagatattcgttgaacacgcctaggctcagagtctcagaggcgctatatgttatgcgactattcccccggcactcaccctgatccgtagtcaacccggtccgctgttcgaaagttctccggaggtctgcgtacaggtccctcatcttctcaacggttccaatgatcgtcccgctattagcccaccggggtcgggtactgagtaaacaggatagcacggataagtgactgaggttcacatgagtacgcactgatacacatctgagcgtttactgactgcggacgatcgccagcttctgcttcctcagtgacgccgaaggaacccttcggtacggttgactccggtacttgtgcgcattcaggctggagtcatgtacacaagctgcgttcagtctccaacaggattcacgcaagaggagtttctatacttacgcctgtattcggccagcatttcttgtcagcgcccacaatcacactatgttcgtgctcgtcgaaccgcttcatcaaagaggagggcggcaattggagccacaagtccagcgcgtctgccatgaatacaacatcgtgatcccggacttgtgtgacgttgtacttattcagcaggaaatcatgtgtgcctgtcagtcacgccgtcagcccgtctcgagatcgaccgactctctgcatctcgaatcaagcacacaccaaacaccttagcgatctgttgcgagcctcgtcctccagtgtggtcccagtttattatgattggtgaatatccatgaacaagggctccaacgagacaccgacagagcgctttgcgaggcgcctccttgttaacgggaaacaacaaaatgagttcccgatcgtcaggagccagggaaaagccagatgatgccggtttccaatccaggcccattgaattgcggatgccgagaaccaacaggacggtggctaccaaggcgacacccaccatcgtccacagccggctcaggagggtgttagctgtaccaaatggcatggccgatgccttcgtcggtatgattgataccaagattaagaaggtctcgcaaatggtatgccctgctttcgcaaagtcgccctgccatctgctcttttgagtgccagtgttaagtactccttcatatctaccgatacaaaggggatcaccgatactttctgctcagatcccgccttccagaatactgtctcgggagccggaatcgtccgaaaatgagcactcggggttgagtctgattccggtatactgcgctactgcgggcttcggaggctacattgggatggttgagccgatagattggcgactactaagacaatagggcccgtagagtgaccattgcacgaaggcaccactggaggtaagatgcctccagtcttccttgcccttggctgatagtaaccccgctcggggttcacatcatatcttgagctgatcccgactaatcgagattcccatactgtctcggctcagcttccatcgggagcagacctaccccggatcgggaacaatatatatatatatccggttgtcgattgtgcacttacgccgaccccgcacgaacccgtggcccggagaacaggccaagcttccagtagctcgcgagcggactgcggtacaggcctgtctaagaacgaaagcacgtcccacatataaacagcggcagagttgatgagatgacgccgttacacaaaatgtcccggccttttaagcctcaggatcgccagtgcaccggactgacatccccaacaatcatgttacgcgtagctaattactcgcccccaagcactagccgaaaccgtcctctcaggcgcatcctggcggtcacagggctgataggtctcttgacgctggttctattgctcccccacccacacaactttcttccaggtcaaggcagtctgttccccagtagcatttcgagatacgcctcgcgacctggcttacttcgacattaccaggcggtaagtgtccaagctgttgcaccttcaaatgtgatgatagaacggctaactcggcacaaaaaagatttggcaaggacaactcgacgccagagtcccaagtaaattgacaagattgaacaacgagaccggtcagatcgaggaattcaccttcgtagagccggacaacgtatgcatgttcgccgcagacactcggcacatcaagagtgagtcataggacgtattcccccctagagaagctttcgactaatcgcctcttcgattgaaagccccggatgagctggaaatggatgttctcgatggaaagatcgaacgaccggacccgtggcgaggcgaatacgttacgttcacgttttggaagaatttcttggtaagcccggtggattagagcggtcttgcaacgctaggatctcatcgaaccgttttgatatgtccagtgggcgtctcggcatggctatcgtcacttcaaagttacgactcagctcattccgggccggacacatctgtgggccaaacttcgcggcatgcaggaggtcgctgaagacaggacgtgcaaggtgggcaggatcggctctgcgatagcacgtctccccgcagggaacctgaccaagaaaagctgtcctccctctattgctctggtccgcagtatcttatattcacggatggcgatgtttgtaagccgtttcgtttgtgcgttgactcgtaaatctggggtcaacctctcttcttcagttgtgagacaggccaactacacgctggacgatatgcgtctacgatgggggatgagtgacgagaagatgatgactttggcgatcgaccaacctggctatggaggcgagttatatagtggacgtataggggtcgactgacaaaagctgaatggattgagtggcggcgaacaggctggaacacgggattcctgatcatgaaaaatggaccggagctgcgcgaaatgctgcaaaggtggtattcgtgcccggacgaggtgagtcgctgtgtcatacggttccatcgatcaaacggcctgacctgctataccggcccggctgctaccttgtgttagattgacggctgtgaacagtacctggatcgtcctccaggggtaattgacgttccaaagtttcttccgcgtcgtttcgaggcttacgttcgagcacctttgacaggatcaaggtgctttcgacgactacttcatccatcccttgctagatgcaggaaagatcgcactcgcaccttgtgcagaggcgaccggtagtgaaaccgaaggaccgcggacgaaatggtaagcagcgctacccgaccatgtatccccctggtctgatgcacttcccttcgaactttgggatcagtttcggttcgatcgttacgcatggatggcaggaaggcaaatacagacagggaagagacgtcattcagcttctcgctcttgaggcactgcaaatggcggctttgatcgaggaggctgctggccattcgggacctttcagccattataattgattcctgggcattaaactcagtaatcctggtgctcaggttgctgagcaagcgatgtcctagcctgggatcgacagccacagatttccgtgagatgagaacagcgtgcagaaccacttcgatgtcagcgggccaccttagcatatggcttcgatttcgcagtgaacaggaaaattagccgcttggactgtcttgtcccgacgatctattttcacttggcgaacatgtccaacccattttgtcggctcgttcggccagcggcaccacagagtggtatcctagacgtgtagcatttgacttatagatgccgaggatagggtccgacacaccgttcgcgaatttacattatactaagagcgaagattccggcatgtggtacacagttggataccgggtcttgtcccaattatcatatcgcttccgtcaagaacttgctcaactccttagcaatacccatcattgctcgaatgtgatgctcacgcccgggtctggacaggctttgttctcgatggttctcgcggtcggtgtccctgtgtcgatcgtccaaccgggagcccctcgcgccgtggtgtgcccccaacgaacttggtcgatgctgtcctcatgagtcgatcgaagtttgctctctgcaggttcgtacatgacggctgcgtgcccgacggcttgtggtttctgagctacgaatggcgtcagtagaaagacccctggtctcctcccgatcgatcattggccgagacgggaatttggtcctcaaccattttcatctggggaaagccagcgccgtggtgatttctgcgaaggcggtcctgcgattgccacgagcggtgctcattcttttgcggccaagacacggcggtgaaagatatacttccggcgcgtattttcaattggtgagaccttttttcaagcgaggttcgggttccgcgcccggagctggcgctagggcgggaagacatgaggcgggtcggtttatcggaggaagaaatacgttccggtggcccgtggggaaaccaagatatggctccgagccacttaagcacgaccgttcctctgttgcggcccggatcaactcaggccgcgaagtaaccaatatacaaatacaggtctggctgcctctgtcgttctaatgtcattctgagttcgagatgaaagcgaaattcaccttcattgcggcgtcgctcaacatgccacgaggtactgacgacatcgaaacgcagctggaaagcttgcttgccgagtacccccgaagtgagaagtcgaagtcacgagccagcaatgctatgcgaagttcgattctgcgtaggtagaatcactatgctgcatcatccgacagatcgctgatctttcacttggtcatgaagcctggaattgccaactcgcaatttacaagcgaaggattgtgttgtggctgattatcggtctccttggattttggtggatgcaccagaccagccatccgctgcaagggtgagagaggcatcttggattgtaagagaacttgacataataatcggagctttccttccgcagagcatacctggttcgtagacacatcttggcaaaacacctaaccttagaagatcaacaacgaacacgtattcttggcaagctagatcattacctacaccgagaaaacccgattacggctggatggtctgccaagaagtaaatacactttcactgttcatgtagcagcactctgatcaaagggcttgatgcgacgttacctcttttcctggcgggagcagtcgagagggagccttgacttatgaaacagtcaagagagcccggaattgccttcatgctgagcaactctttacggaacttccgtggtggcgtcgagctattactgcgcaccctcaagatgcacgggttagtgaagacggaacttgcgctgaacatctcaaggtagcgatcctctggtcgagttactgtgagcataacgcttgagggacaagtggtcacacggtttgactcgctccggttcgatacaggcaaaggcgcgctggatcagtgggtacgaggggaggatatccagtgtcgttccatgatccgcagcctttcggatatgggatatggcgtgattcctgtcagagatggggggcccgagcagcttttggaattccacaacctgtttgaggatctggtcgtggcattcggtgagctgtcttgtcgccataatggatagctacagaagatgtattgtactaactgacaaaccaccgcgctccatcaagttgtacaaccagaatatgtcaagggcctttttagcgatcctctcaaatcctgggtcgatgactggaccacatcgaaagctactttctcgggtcatttcgatcctcaagcgtcaccagaggaggaacctacacatactatgcccttacataagatgttccttctcgactggtggggagtgagagaggacaagcaagctatgcaaccgcttgggtcagagtggcacttgacgccatttcaaattcctggacatacatatgttggattcagcatcgaggtacgtggctgcatactaaacgggccgataatcaccgcttgatcggtgtctgcctcactatcaactcactgacatcactatcaactcactgacaccgcgctctaggactcgtgtgatccatcgctggttataccaccagagaaccggactcgatctgctctgatccttggcaaaagacctgactacttccacgggtacgcttggaatgaatccacttgggcagaactggcacgcgaggcaaacgttgaggtacgggcttataccggtggagtccaacagaaagacatgccagcaggggtcacaaacggaggcgtcgtgtcaagagaggaatactcccgtggagtagcacaagccagtgttatgatcggtgtagggatgcccggatcaagtcccagtccgttcgtcgcgctttgccaaggcaagtcggaggcctatctccccgcctcggatattacctcgctaacagatgatgaaggctgcaggtacaccctttgtcaatccacgacgcaagggggctccaccagtggcagaatggtacaagtccaacaacgtcaatgaatggcaacaataccagcacggacctttggctttctacggaccaccgtaagggatctcaggacattcgagattcagcttggcaggactgatacagatctccttgaccttgagaaacccatagctacgtctataacgttgaggaaggagatgtccaaggactcatctccgcggtcaagaccgcgatggataaccccattcccagttggattccggaggaaatgaccgaggtcgccaatcgggatcgcatcgcgtttattatggaaagggattggaagacccggggggaagagcgagcgcgagaattaagctccacagtcgcgtaagtgcactcagtcaggttgctatgccaccttcattgacgcgtcacatgcctttctcgcagcgagatagcgagggctgaaagagcacgatacgttgaacgcgagatcatgtggttgcaagaagcggataggcgtcacaagaaggagaaagaagagttagccagagccgcggctgcagcacgggaggcagagtccaaactagcgttgtgaggtacctgagcgaaacgatcatgatcgaggcgagcaaggcacgagcgatgagtgagggttgtattaccaagtggaaccgctaaaagctagatgcaatacttcgtgttgggcaatatgcgcggttcaagagctaagattcgaggttttccttagataccactagtcttcttgtttcagctgtgaaagcgcatgggccgaggtcgtaagtagccagagtttggaatgcgtgatcatccccgttagattacacattgatcgggcttaacttcgggtggcgcgcagtggataccctgtgctccacacgctgaaggcagaaatacaggttttctcagaggagatgacggtccggctggtactggggtaactgggatcgctagatgtttgacgacaggtgcagattgttcattttgtctatgtacgttacatgctgaaaccgggactatctacaggtgcttctccaaaccgatcacaagatgaacagctgtgcgttcatcgaaccctctcagaataaacgagtgcaagaggaaggaagcgaatctcgaaccgagtgcttactgtttcatgtcctccttctctcaggtgcctcaatcgacgctcagctaagctataccagttcagattcaccagatcctgatgtctcgcgcggttcgcttccgcagttacgtgagcagctgtagagtgcgaccgtgatcagccatcctactctcccaacctcgagataagcactgacgggtatatgagtcaatggggttggcgacggctgccttcacaacttcctcaagcccatctaaatctcctttgaactgtttttgacaggagagtatcgttgaggccaagcccagctcactacacaattcctaaactcaccacgtgatacacatagggagggagctcgttgaatagaccgctagcatcacatgaaaattgatcagaccagccattccctcatttgatgagcatattcgagtcgctcacttgtgctgacctacgatgagtgaaagccatgggcacattaacttccggcgtaaaccgtggtattccgaacgaccacttacaattccatctctgcttgttcatggggtcgttcctatcccagtccataatcgggttgatgaaaggcagtcccactgtatcgaatgatcgaggtcagcctaagatggtaacgttcaaaaaactctagcgtctactggatcacgcacgtgccaggccatcgtaaggtgtgggcgatatagtcggggcaccgatacccatctgagcaagtccatcggagtcagccggttctattctggcttaagagcgcactcgcagataccctcaccatgaaccgagcttgcgacatgagtctgtagaactccggcatgggttggcgtccataattttcgagaccggggtccggcaagacgtcatccttggatcctgctacagagatgaattcgagagccgtcactgccttcaagtcggcaaaggtacggttttcgtgccagaaagcaaaattttgctgtaaacccaacaaaatgagccgctttccaaatgtgcctcccacttgatacgaaccttttcgaaataattggtattcttggcaaacacgaatccggcatgtcgtttctcgcctagtcccgtgtaattgaatgcttttacgtatttagcggtggaatatcccaggaaaaagttgtgagagcccgaattttggtttcccggatgcgagccataactattgaatagcgtgctctacgttcagtgcaaaatgctgttggagatggacgcgacactcactcttcaggtgacaaagtccaagcccgtccgagctagcacgaaacggcggaagaacggtcagtggtcccggaatctggcatctctgtcgagggctacccactggatgatctgggccctacaaagttattcccgagtcgttaacactggtcttttagcgagaagcgacttgtactcaccggccaaaacttcatgctggtcaatttccagatcggtataccggtcggaaagatttttgtcttgacacagaactgctgtggatgatcggcttcccacattttcggtttcctccagccccattgttgcttcgagtcttcattcgatgaatacatttcggggaccgttattccgagcttgttccaccgttcgaccaattcctcgtgcgaaagagtaatggcaccataccaatcggtaaagtcgcggtctttcagcagctgagggattcccaaggtggcacaattggctaccgtgtcagcttgagcgatgatgacaggtaccagatgtccaatggcgagataaatgtccagcatttcaagcagctcgtagctgtagacgacggtatgtccaagttccttgaaggcgtcgattgatgaacgggccctgtagaaaccgcgacgatatcgacatcagatatagtcacagccaaccctgaggtcgagcgaggcccgtgacttgccagatgtcttcgccgctattcttctcatgctgcgagttgccatagtgtggactcgcacccatgatcacggtcgtctctcctggtctgcacgagtcgctttcaatacagtcccggaggcgttcgagtgtaacaattgtatctgcgcgaccaggttcgtattgcgagcttcgacacgatgcagaagggaagagcttcagtgtgaaccaacgagaagcgcggttcattcggggctcacttgggccaattgaccgggagttccttcaacaatttggagatccctcttagtgactgctctcgctcttcttcggtcaagatacgatcaatccaatagcggccatgagcccgagaatcctcctggttggcgtgaatgtccatgaccaacgattgactgtcggaaaccgagttgacgtcgtctttgttcacaaagttgtgggcccatttttcgttccatgcaagcgacacggaaccgttattgcgcacgtcaggatgtgctgcgccgtaagtgcgcgtccagctttgagcaaattgcttgacgggtgtgtggtccagcagctgagggttccgctcaaaagcgatccggaagaccgccagaatacatgtggcgaagaagaccaggcagatgaatgaatgtctgcgagcggttttccacgattagcctccattcgccaaacgtgagagcttttgttactcacttgcgcatgtttacttgctaagatgccaatctatcgtctttgtagacgagatgacctgtgatctggatcgcgtacagacctatactgtctatgaaatggttgattagcctagtatttgtgccggtgattcccgttcgattctcatcgacctgaccatcgcaacacatgtataaggattacctcgaagggaattgttcgtagacagccgagttatcgggtctattctggcggcggggatgtcgtgaatgcaatgccgtgacgacatgtctcaaagcggagcgattaaacgtccggccgcgccaacgttgatcgagtcttatttacccgtgtcccacgtttttgtccgggacgaggttacttccgtaaatgagccaaatcgcttccgaacgaattcaggtaggttgcttccgttcatacaagctgagttccgaagatgtctcatccgggtcagtccgtttggtgcagcaatcagattccgagccggttggggcccggtcctgagcggctgaaatcaattgaatggcccgcaagttcttgggcgtagcggattgcaagaaggatattaccgtcgagcgagggacggcgaagctttctgtccagacggggggcatacagcgatcctgtccgtataaatgctcaccccattgacacatccattccccacttccctctgaacacctcagtgtcacttgccaatcacgaacgttccgatcgccaaacaagatgatccaaattcgtcactccgtctacggtcgaaggcttaacatcactcgtctggtgctcctggccatgagcctgatgttgggcctcgtagtatggtttcccgaagctttcctacagatcgctctccttcctcgagatggctatagcattcagtcgcgagacttagctgccaaccagatgcaggggttccccataaccgaaattcaggctcatgctccaggatttacagtgttcgacaatctgtaggtagtgactaagatgctcctgctagaagtcgttcgctgtgcgctcatcatctgctccccgcagctactggcataaccacacattccacatcgtcacagatcagccctggtctatcccaccaatcaagctcattgcctcgctaagcaccaacacgaaactcccagcaaacggtcgagtggtcgcaaaaatgctgtcaattcgcggaaatcctgtcagcccagaggtcaaggagcaaaaccagatcggagaaacgatcagtatggacgacgccatggccgtttatggttcagcggagctgatcgaggggcccatggtaggctgcgggcggtccacacgggagcgggaaaaaagattttggcagctgatcggctcaacttgatgcagatcatcaacaacgacgacaactgtaaggcattgcggggtttaatcacttcagacacagaacgaacttgactaatatctccaactctcggcgggttcattgctagtcgccaatcactgcaagtccattgccaaagatcaggaccctagaccatcagctgacgatcgttctacattccgactttgcagactatcactggattggcgaaacgtttttgggagcatggcgggtctggaacaacttggcattccgaactggaagaacgctccctctggtcaagcgtgtcggcttcactcagctttacgacgtagcggatgcgccgatcgaggtcctcaaatcacacaagggtacattcaacgacaagcccggtgcgaacgtgtggttcaccgaaaagttcttgtaagtcgccaatcttggagcagggtccttctcaaagcttttactgagcggaaacgtgtatagtccaaacgttgcatgggatacgagggccgtctggaaccagcgtgccgattcgggcaaggtttaccgcattagcactgctatcatcgccgatcgtgctgccgggcattctggaccgtctgccgccttcaaaccgtggggcgatgttttgcgactagcggtctcgccagattggctgatcaagcttaggaaccgagtcctcgctgattaccgcggaagtacgcctataactatgcccaagaagccccttgttatctatctggaacgacaagattcgtctcgccgcctctttccggaagaccacgacgccctgatcgttgctctgaaaaagctgcaggaggatgacgtcgccgatgtggcgatcgaagctttcaactcaactattgcattcgacgagcaagtcgcaagaatcgcccgggctacagtaagtatctcgctttttgccgacacacggagtcaggggttgaatgttttgtgattagatcctcatcgctgttcatgggaacggtctcacccactccttgtggatgacgcctacgccaagaagtgcggtcttcgaatttcagccacgcacgtgtactattgcaagtcctcgtttggtatagacttctggccttcgagaaaacggaaactgacctcacgtggaattgcgcagacggactatagcccacttgccctcgctgccggtctacagcactacatggtacacgaggacaagtgagtttggtataccattcagcaacgggatgctcgcgcgccatcactaacgattgtctcggtagctactgtaaaccgctcgactgtcccaagagaaattgcgaggtatctgggggaatcaacacggagatccatctcatcccagaagttgtgacggacgagattcgcaggttgttggcctagacatagattttcagacagggaatgatggacgtggacgtcagacacatttgtcttgtataatagggctaaaccgacgttagatgtcaactatctcgatgcatgtgtttgcggttcgtaagccaggactgaatcgatgtcgcgtgcttaatagtgaaacaggagacagtctcaaccaccaacatcccagtattgccttgtggggattgcggttttgtttcgattataagtgtataatacccgacggtacatccctcaaggtctatgtaatgctagcctaacttgtattctcgtctcctacagcacttttatagttcagccgagagttccttgtcgagcgatttcttgtatcaggttttgaatgaaattagcattcagctaaacagcgcatgacatccaggaaatcagcttgagatgacaccgccatgggaccaataataatgacacttactcgaatatttttcccatgaaatcctttcgattggggagttcccttgccctctgggctcacccatctggtccgtgggatcgatcagcttgaatcgccttacgaacgaaagtcatcgttcggcgcacctttctttttcgaagacggtatcgttgtgcgtagcgtaatacctgtggcccatcaactctgctggtactgcatagtccatcgcgaaaccgccaacatccataacctggggggagcaacctaaatcagcactatcttggcagcctggtcgaatttggactcacctcgatgaccgaactacctggctgcatccacaactgatgactcaagccgtttccatgtactccgaggaggatctgccgtggtttggtagctcgtcaatgtccagtggccgatcgcggatggctatctcacttacatccgtacgcgaagccaagcagaattgttcaatcctgggaagcgtctccattagggcgttataaaattcgatctttccctcgtcgtgcaactcttgcaatttggtcagcacgttttcggcatcggtctcgttgagtctccgtcccgtcttttggcggttgatataggtgactactgggatgtccttcttcttgcgctctagctcgcagccgtaaatggcgccgatgttacgaatgttgttacgaaggggcgcaatccagtctttcggggcttcgacgttaacaacctcggcagacattttgttccagcgagcattcaagccgccgaaacgatgagcagcgaatcgctacatggatcgcaagacattttcagattcttccgtgagcgacatgacccgaatgatgactcacgtcggagatggtaatcttttcgaacaagaaagtagtctcggactttgcccgatcatcccagacgaacttgtcttcaaccgaggaggctggcatgacgttgtttaggaaccaaggggtaagccctgctcgatctcgctattcgtcacgatcaggcaatcagctcgtctcgtccgttctgcaaccgctagtcgacgtacccaatcctcgggggctgtcctgaacatgatccgacgaggaactttcatgccttgagtggttccagatccaatcgtaaaagcgtagtccgcagctaataatcgccaagctcccaaaaaggtctcaacaactgtgaagagcgagcatactagtcattaggctgcattttgttcaaaacttgcaaaatgacggttcgctcaccgactgtcatacagggaattggttttattgcgaccggaagatgaatccgttagcataaatatctctaggtaggcaggattcgactaacagtgaaagtaatgacccatgaatgacgacgacttggcatgtcgttgatcgttcagtaaaacctgtaacgaggcaggtacatgagcattcagaaaacgcgttgaaggcttctggaaggactcacgcttgcgccttgcaacctgacagcgacccggcccaaaatcatctcggcttcctttaatcctacgacacgaaactcttgatcaccagcggctaatcttgctccctcgtcggtcggtggagccgacatgatgaacttgatgggaggaagctgctgttcgcgatcctcggtggtctcggcaacatagtagaatgtgccatttcggaggtataggtttgagaacagtgctagactcgggccatcattgattggcaatcgccaagcttcattcgtcaatcgacacttacaataaccagctacaccattgaggtatatgctagtaggaagaggactttcgggcctgtccaacaccaggtagtcttggtcctcggcgccttgattaagggattgtaaagtgggcacgtattcctcttcctgtacaaggccgtagtctccaatggaacgaccactcaggcgactggaccacgactatgttgtagaacgatgctccaatccgtcagccgcgagactctccccatgtccgaggcagccggctcacctttcgtggcgaggcgccgaggcttcgcggatgccagaaaagcgacgatgccgtgatgaagagcgcacagccaacgatgatggtgatccttctccctagtctctttgcgttgctctttgtcattgcgttgctctttgtcattgcgttcatcgttatggttggtgcttctatcgcaagttcttaattgaatagtgcgaccaaagcttcgtaaagcggccgcgcaaaggcggattccgcgcgcgcaggacctcagcctataaacgaaatttacgtctaccatcactggcaactacgagcaatgatctcttccgaaccggaccttccgagtctcccgtgacattgtcagatagattcctcgatcataggaagattctgaagcggcctggaggcaacccatgagtctcgggatctcggggttgcggggagttttcgcctccgaagtacccatagattagccgtgtggcgtggttggagcgtttgagccatgacccgcgcgcttgttgcccccgggaaccttaattgggtcccgcatcaagcgcggcttcataaaatccctgacgtcgaatcagtgtcaggtataactagcacgcactcgagcaaaagttcagcttcaacatcgccggaccatctatcagtcttcaagacagacttgcgcaactgaatcctctacgatgctctaccacaacgcccttctgctggtactccttgctcccctcgtcgttctttcgacggtagatgctctctatgttccccgccatcgaaacggtcgaagccagaccacctttaaagccgcccaagacaaactgttacaatcggatggagtcacttttgccgattcataccatgggactcgcgtgttgaagatgagcaaagccgaacgatggtccctcgtcacatcactcaaggcacttaccgagaagatcaagctcatggacaagaacacgtgagtaaaaagcagggagaagttccggacttcagaataggctcaaaaactaacatgaataccgtctcacagtgagacctaccatgcccaccgatggaacctccctctatacaaaagacttcacaactgtattctggcttctcttagcgagattgacgactacagcggaatcctgcttcacggcaagtcacccagagaccacatgcaaaaggacaagggattttcgacgtgtaccgacgccgagctagacattgtcattggagttggttccccgttcgaggatgttcttgacggaaatgcggaagccatttggtaagccgttcagagcctcgtctcacgagtccccggctcacgcctcttcttggcacacagggcttcgtcaacaatcgagacgtatgagcaactcgatcacacattcctctactccagcagcatgttggacgccatcagcttatatgagcaattcccttcgctcgtcaaggtcgttttgagtcaaggagacgatctccagaaatgcgtggcctacaatgcgcccggcaaggagattctactatccgaggaggacgtcgtcctcggaggtaaaatcaccgggtatcagttcgacagcctggtcgggactcgcactgtcaggatcagcaaggaggaactctcgaacaacgatcgcgatccgctctcgacagagttgcgtgatgactaccaagtgcgaccttacgggtacaaggcgcttgcaccaatcagcggttcgcacaggaaaaggacctatccggccacctgtgtccgacgcaacgactctgactctggtatccctatatggaagctctttgaatggcagcctaaggatgcggtgtctgtgcatcctgtaagcatcatccgcacccctaacccctaagttgcaggactgatatcagcttgaccgatagctgggtcatcaatttaccgtatcaccacaccgtactgcaagctcttcgcgcatgccatcttcccagaatatacatctcggtaagtgggcggtatacatgagtataaagttacgggactgacgtcatctttcacaggcgtcagcttggagggtcgttgcggcaaagctcttcctaacaagacacgcttcaaacaagtctatctagctgccgaagacacagatcagctcgagcgaatcagaagcaaatacatgagcgacacctggacgcgtttgggtagcgaatttgatgtagagtttgtggcttctgccggtctgggaggcagtggaggcgacaactcgatcactaacttgggaaatatgggcaaacgagctcaacgtgacgagattcgtcacagtcgagtcttcttgtgagcacgagccgtgactataacctcaaagaaccccgcttatatgcctcttaccccttcagggacctccgacctcgacctctggatcacggggccatttacgaagcgctttgcatgggcttgcccgtcgtttaccttcgatcgtcggttgctggaacgtgagtggcacataagtctgttcggtgtctgttcgccaggctaagacataatttgaccggccttgacagcgctttggcggatctggcagctccttacgcttattcgatcgtgagtgattgctgcagaaggcctgcagaagcattgtaattgatgatatcttctcactcaggctggagaccctgaatcgctcgccgaagccctgcatactgccttgcaaaacccgatttccccgtacctcggtaagtcacatcgaaaaaagaagaaaacaagatgaaagttcgtcactaatcctagctgtcacaaacacagctcctattgttaccaagacttccaacgaagcccgacacgagttactcgtgactactgaatggaaccaagttgtgcgaggcgatgcgaacttgcgctcgatcgtcaaggtcgaagtgagtgtgactccaccttcagaatcatcatagctcgtttcctaacacacgcaatcgccaaatcagggtttcgatatctagacaagactacaagagtcgtgcgcacaccgaattatcataatagactcgctcgacataaacgttgtaataggcttagaacggctggcatgtgacttccaccacatttataatcgcgactttgaacccttgttgagatcatatggttgagaaatgagtccgccgccatatgtgtcgactgataaagggttcttatcaccggaaaaattcagctttgtcacgggagcgatgttgcgcctttcgggtgtctcggggaaactaagaattgatcaatgtctggttacgggtcacgggagacttgcttcggaggcgggctgaatagaggctgagccaacgggaaacttcggtgctagttagttgtcccgggcgagtcacagctgagcaagaggaagagccatgggccaatgaaccagctgatactctcgtctcgtgaatagagacagcttgagagattattgtacgatcgctaatgcgaccttgaagtggtgcaggaaacaatcgtggtatgtctcctccccagaaatgtcgtaccggtgtcgaagtacataccgatagcctctggacgctgtcttgctctttcatgcataatctccggctttatcttttgggaagcgggtccgaaatgtcaggcaatgtctcaactccacactcctcccgaacttcgctcacacgcgcggtgcacttggcggagctccatttttgggtccgattcttcccctcgttgtctcggcaggtctgcttcctagaagcctctctcgtaagcgcgggatctttaccgtgtattaccccaggaattggctcactgatcatgcctctggttgcttgtgaaaccatatagatcttacctgaaggttcagacaaagcagtcctgggcccacgataatcgctgcacttcgcttcgagcgccgtatgcgaccgacgcttccgcttcgattcattactcttgacaataggttcaatcacgctcttcactcgggaactctacaacttccgttcgatgatactgccaaacatcgacatggcctaacgaaccgctgcttcacacgactccgctccatcgaaccagctcaatttcgaagaacgatcatgcaagatcaatctacctggcctcggccatggaatacctggctttcgcagtcgcgcacgacactcgtgtctggaaacagattcatccgtctcgaaacgacacaccgggacaggggccgtttgccgagagtgtagtactggtccggcagccaaactggtaagcccatacatcaatgtttgtgaagactaccgcgaagatgcggaagacatttgaagcaggcccgctattaataatgttcaatgctggaatcttcatctatgtgagtgcattacaatcggctgaaccgttaccatcagaagatgccctatgtgtgaccagaaccggcgtcagcacatttaagcgggacggaaccgccatgtgtcttcctcaccttcatgaaaggatcctcttgaatctcctgcatcggaacgaccgactcggacttccagtctcgctcaagcaacgcctgatgtcgctttcggttggcgtcggaagtcatgtgcggcgctgcaacacaagatgcgtcagcaagattaccgaacgtaaaactctgactcgggactcacggatatagggatcgatcgtggtctccatcgccttgacgaccgcctcctcaaagtgggcgatatcgtgttgccgctagatcgatcgagtttagcgacgtcgaaacttgaacacgggatggcaaaggcagcttacgacatggtaaacgtatggttcctgtacttcaagcaggccgctgtaaaggggtatcgacgatgagcacaaaagctcgtcgtccaagaaagcgatcgccccacggggctgggaagacgtactcatgttgagctgaggtttgacaaggagtcagagtcggaagtagcggagcgagaatttgacagtcgactcacaacaccactcggacctgtcttcaggtttcttatcatcccatcgccagagcgggttcaagaagggaacaccgactattgataccaattcgtatcaggcattgatcggtcaagcatctgtcaacagatgacttacgacagagtgcatcatacggcgttggactgatggttggcgaccccacgccgaccactaatctaccccgggccaactcttcgtaaaatttcgcttcgggcatccttcccatgttatggatgccagcctgggtggacacgtcgccctctcgatcggcaccggcgacaaacgtaatgttatacttggcggacaggtcggcgaacagcgtcttgttgggagagtcccaggggaacgtctttgcatcgaggatatgcacgtacttggcgaggatgtacgcgcggtggagtcgctgatcaggaggatcgacgaacctcttgcagtacttttcgacggaatagcctacgatatcggaggcgatgatcagaattttttcccaagatcgtcacaaccggggcgaacaggacctaccaaggtagaaattgccgggcgatccattttgacaaggatgcttgacgtaatcctcgggcgacaaggtccagttgcgaccaagctgtcaagcgcatccagtcagcgaatgctgatcgagtggggaatacgacggtggcaacaagaagctcaccgcatgcgcgggtgaaccccagaagtggaaactaaaaggcaccaatcaacatgcatcggacggacaaacacgcggtcctctgaaaaacttacgcaaacatcttatagatcggtataccgtccggatatccgtctcgacggacgcacccgcctcgctcgacctgttgattctccatgatcttgaaaccccactgactcctctcgtcgatcatgtcggtgggaatatcccactgctgcatctctccctcggtcatgttcctcgcttcgccacgccagaacttgtccttcggcagcttcatcggtcggccgtaatgcacgcactcgtcgatctcactggcatcggtgatgactgtagagatgagtttcggtatggcctggtagatgtcgagcgtctccaacatgcggtaagcgataaggacggtacgcccgagttcttcaaaggcatccacgctcgatcgtgccctgaacgcgcgcatccagcagcggattagcggccgatcggatcggttacaagctggaacatcaatctagagctcaccagatatcctcgcccgacactgcccctccaacaccgttcccaaagtgcatcgatcctgccaggacgatatcaccttggctgtcggtacacgtatccgcttcaagacataacgccagtgcttcgatcttttctagcgtggtcgttctcgaggcgaaccagtgttcgcttttcggcgggagtcggaattgtgtcagagtggctatccacgtgcttctttcgaccgccactcactgtgcaggaaacctttcccgcagcgtttcattgagcttgatgagattctgagcgtattgtttcttctcctcgggcgttatctttgaatcgaggcttgggaggatggacccttcgaacgtggtcggtgactttgcagagctgcccaagatgtagctccagtcgtcaggaacggcatcgatatcgttccagtagagaaagagggcggaggcgagtaacagccagacggtagccactcccgtgatgagagaggatctcgatcgtagaaaaggtaagctgctatttgaacaattaagcagtcggaagggattttgtcagtcatcaatgttccggcggcgaccacaccagccacgcggtatagtttagcttacccgaccatgatgagcacgaatagcaggcactttccggtcgttcgatacgatcgaacctcaactgcgaatcaaaaagcaatcgagtagggtatcacatatcaagcatgatcatcgacgttcctccgacaacaactcggaccatcctggtggccagacaaaatgttgattacgagcagaatacctagctcaacctccgtcagatcgctcgctcccgtcttttgctattcccgaccttcccaccttccaatcgttcaactttgattttacctccgaagccggtggtggtcactttcgcccaggaggacgagccacgtttcctctcctctgcgaaacccaaaaattccgaggctgtcgctttccccctgctcgaccccttggtggttgacagaaaattgaacgtgtagctcttgccgccaacgacctcggagcggaagcgaaagtaccgcggcttcgaacaggtctgcctccgaatcatgctcgaactgggctgcaaccgtcgtcattgcctagttcatcgtgctcccggacgggcccgcaagacaatcggttgcacctccaccctcgcccccccgcccttttcgccaaaccgccccgtgaacctttttccacccgagccaagatccatcggagccttttcgagttcgcggcgagatcaatccgtcaacttccctgcctgtctcatcaagacgagcccgcaaaacacatccagcgaacgctcgattcccaccacacaccacgggaaacccgtctttcttccgtggtgctcgacagctcgatccgttcgactcgaaaacgaaaccctgccggggtgccgtcattgtgggaatgctgcgaagacggttcgggcttctcgccggagtgatcacgttgtcgctgatcgccctgtatcatggaccacttcgaacgatatcaagtttcagccgatccggcgccgtatcactggacccggacgagcttaaactttacatcggcaatatcgattccttgctcgtggagcacccaaagcgttggccaggcaagtgagtcaatcaaaggcctgtcaacaactgattcgcgaacgaacactgaacgcgtccattcgacgtctgtctagcaaatggacagcagcgagacagatcactctggatcgcctagaagccttgcgagaatgtcttcagaccgacacctgcactccggctcagaaaaccgtggtcataggaggctccttccactttggaggcgccgcgagcggctcggtgagcggggaagacatctggtaagcaattcgtatgtggcacgagccctgtcgatccggtctgactcggtgggaggatcactcagggctagatctacgatagacgcttttgaaaagcttggctacacgttactatactcgtatcgagagttggaagccctggagctataccaagcctttcccaagctggtccggatcgtcatcatggacgccgtgttgataagcaactgtctgcacttcaatcgaccgcaattggtccccctgaaagagatcacgtcaggtcgattccgacagctggaccgagaaggctgggagtctttcgggctcgtggaaccgacgtcgagcgatatgcagtggggggagagcatgatggaaggcaaggaacgtcacgagggatgtatacggcgagaaagctactctacgggcatccctctctggaagacgttggcgtgagtcactcgatctggcagccccctctgccgcgggtcaagcgaagctgaatgcacccaacgatatcacggttgtagatggcacttttgggcaaaccccgctcatcccgtgagtttccgagtctttgccggacgatgagccgaatggagctgacttgatgacatcgtcactcttcagttcggtggacaatggaccctgtcgccggaagactattccaaacagccttgtcaacgagccaatccaattcataaccgctatatcggtaagcatatcaacaggcaccatgctaagatgaattcggctcgaaactgaattcctccttaaatgatccggcaggctactcggtcgagcagtggtgccaagactaccggtcgtctgtaccatcatacagccggccacaggaagccttcatcttatccaaggtggtcgatacgtttgatacaccgtccttcccatggggcggtcaagagaatcgcacagtgtttgccgatctcgaggcgaggtacggggtcaaattcattgccggcgccggactcgcttccgacgaggtcgtatcgaagggtgtgaacaacatcggtagaatgagcctggtcgacttcaacaagaggttgacgcagagcaggatggtcgtgagtcgagcttgggtcctatttgcctgtcttcttccgctgacgagttcgtcctcttctctacgtgtcctcttctctgcagatcggaataggcaatcctttgcttagccccaccccctacgacgcgttgtgccgtgagtggttgtcgataagcatacgtgtcgtattagaggaggctgattccagggatcggttgtgcgcttgcagtcggcactccctttatcaatccgattaaagtatgggacaaggacgatccagataatagagactcctggtgtggtacgttttcaaacccaaatcccgaatgggagtttgaatagaaactgatgcatttcatcccatacaggtcagcacgagttcgtcctagctgagtcaccgagaaagtcgtgccatggccttgctaatttgatgtgtccgtaatccgcagcggactattagaaatcgacccgccttacgtatatcacgtggtaagtttcagcaatggcaatcaggccgttcttttccccttttaatcctcatatcgtcttcgcagcgtcaccacgacctagacggtctggagatggccgttcagggggcccttcagaatcctatcgagccatacattcgtgagtctcgccgccaatctcgtatatctacatagtcatcgatacaacctgtttgtgccatcgcagccccccatctcacagcggaagccctacgtcgacggcatcgagaacttgtagagctggattgggagacagaggcagatattcccttggaaattttacgaagtcatcaatcaggactgcacacagtgagtatcaacattaagtattccgcaagttaactttcgtcatgcacagctgctgatgtcgactctgctgcccctaggacgtgttctagacccattgcacttcgtgaagtggcttggaattgatccgcacttacggatataattgtaatactgagggtaattaatagaggaggtgatggaacaagaagcactccaccggcagtccgcctcatgttcatttacagaaagaaagatgagcgagcgagatgtgagccgccattgacaagtctaatgggtacaatagtcagtatgtaggtagattgacgtgggaacggtccaagccggtctggagccgtgcctgacacgttcagcttcgaccgatgactccgctcggtcgaggtcgaagtgaagtagcagacggatattcgcatgcctgggatcagcgtcatcttcatcccgggaatgcccatgtgctcaagcggccagagtgggtatgctggggccggcttagactattagcagtgatgagaagcgtcgatttgcgcgctcagcatgactgggctattgaatggagacggataacttgtggagtaggccgtggtcggtgcctgcccatcttgtacgcccgaacattatccctgcgaactatcaaacgagccgacgagtgtatccctatcttagtatggagcgtttactttgccacggacggcactactctccgtgagacctgcagctaccccgaggaggtcaatcggggttattgtctccctggtcgtcgattcggaacacaggcgatgccaacaaaaacaacaggatcgacgatgcgatggttccagagtgccgaaaccatgttctgcgccaacaataggccgggcgattgccgatcatcggtcgatgcacttttgtccggtgccgccgctcacaccagcaatcgtcgtggtctccgctcgcattccgactgactatgaatggactggccggccgagatacggtacctgctgacccacttttgccgatctatattacctcttgcagtcaatttggccaaactttaatcaatcacgcatggatcagggggcggtcatcgtgatctgcatcgattgattttgatcgcaggatcagcacgtcctggccccccaggctggccaatgagggacctgatctccgcgagctcgatccggtccctcgtgttgccattgttcttctttgccaaccggtaagcccccggtccctatgccgtgaggtggagggacggaggcggatgagctctcaggcggtgctgggcggaacaagaggccaaaatagacaggcagaagaaagaaaggcgcgcgcgagtagggtcgcttctcgctgaccccgcagtaccgaccgccctggacccttgtccctcgctgagatctcgactcgatcaggggctgattgatgaatacgacaaatggcgcagacaaagtggctttcggcagcctccgtgctcccacagctttgtgaagggcgagacgacgataccaagggggtgatcaagggatcaggagggggcgttcttgtcatggccaccggcgatgtttctgcatgatgcagaggcggcgacggggcgttccagaagatccggtcatgatggatcgtatatcatgtgtcgagtactggaatgccatgtcccccttttcgttgttcagtaggtggaatttcctctcccatcagtcaagtctatcctgttgatcagctctcccggttcatcgtttcggtctcatagtaggtagaccgtgtccaacacgtctcgatcgcaactgcactcgactgactttctcttttccatttgcgtcccgctatccagataccttcgcagctggcctgctactcgaatatcgttcgctggacgtccgttttgatacctctttgcgctagaacgccatctccataatacccgatcgaacaggcttccttcgcaacgaccaacatgtgggctactaccttgatcaccaccattctcatcggcgctggcgccgttatcggacgacccggctggcacttggacggactgtatcctctagcttcggaacagctcgactcgatcgtcagccctaatgcccaatccagccacatgcaccgaatcttcggtgagtcttcgcgcgcccatgcgttttactgtcacgcgcctcgcttacgctcgtctcgtttcataacgagtcgtaggttcatccgccttcaaggcgtcctttgactttgacgacaacagggctgcgtcatgttcatccgtcgagtttcaggcagacatgtccaactactggatgcctcgtgagtcgcattccagtcgcgtcgtcaaagtgatctcgctcaacgcccactcttttgccttcagaactgtattggatcgacaccctcggtcctaccaccaaatttgcgcctctgaaagctatcagccgtgtctactactttatgcctaccaattctgacaagtccaacgtcaccgcctttcccgatggtctccgcatcctcgcgggaaaccccaacaacaaggcttacaccgggcaatacgccttctcatgtcaacgaaaccgggagatgaccgacgtcattcagggcaacgacttcaactttgctatggactgtcccttcggaatgaagagcaacatgtactaccagaactgttggaacggaaaagacctctggctacctggtaacgcacacatgtcgtacaccgcttcgggtaaccctcgtgttggagcctgcccctggtcccatcccgtgcgagtccccagtatgatgctcgaagtcacttggcagacgatggaatacgctcccggacaaaccctcaagggtcatctcgcctgggccaacggtgacaccactggacacggtttccactcggatttcaccaacggttgggaccgcgacgtcttcatcgccgccatgaactcgcccgcttgctacgggtcaaacgatgacaacatgggcatggccgagtgtcccgtctttgccgcctcgcaggaccgcaacaaggccatggcctgtcgaccgaccgctggaacgctcaaggaacccaccggtgtcgtcgaaaacgttgccatcgatgcccttcccggttgtaacccgctctgtgagtcgctgtcgatcgactcggtcttcttccacttgaatgctcattgtccacctacactctttgacagggggtgccactggttccaagcctacttgcaacccggccgttcctggtcttgacatgaccggtctgactggcacgaatggacccttggttgccaaggcggaacaacaagcttacatcaagctaccgaccgagcccggttggcaccgactcggatgtgtccagaccaacggactgaagaatcagatcagcttttacgacggtggcaagttgacgcagcagcgatgtaccgagtcttgcctcgagtcgggataccactatgctggtgttggaaaccatgccgataccgtgagtagcaaccactcgtatcccacatagcgaaactgactgatggactccgaaacctttccagtgctactgcggtaccggaatcaaccccaagacccctcatcaggaaggcatgtgcactgctccttgccctggcaattcgactcagactgtaggttggcctgtcgaccctaagtattccagccccgaccgatcctgacgaatcgcccttgcagtgcggtggcgagtacatcatcgacctcttctacgcccccgacaacaccaaggccgatactcacggattggagctcaccggatgctacagctacagcggtagcaacagtctcaagaaccaggcattctactcgttcttgtctggctccatgacgactgagacctgtcttcaggcttgtgtcaaccggaatgcgacttgggccatgacccaggccggagtcaactgtttctgtggaaacaacgacatggataccgctatcgctacgggaggtaactacatccccatggatacctgttcgcgagcttgtggtggaaactctacccagatgtgcggaggtccctacgtcggtagtttgtacaacttgagcaactcggccgtctcgctcgatctgcccaacaagcctcccggctggctcggttgttacaacggaggtggaaacgctctccgagacgtgacttggttgaacaacaccttgactgtcgcttcttgcgtcaacgggtgtaacgagttgggttacaagtacggtggtgtttctgtcggtaacagtgagtatcttccgacgagaccagtcaaccggagtcccactgactctcacacatttacctcagaatgtcaatgtagcagcgtcgacagctactttggagccaggttgcctgccagcgaatgcactactccctgcaagggaaacgctactcagacctgtggagcgacctacaacgtcgagatctacgacgcttcggtcggtgccgactactcattccaggacgtcatcgccacttaccccgatagttggatgggatgtttcgccagcacaggtagcaatctccagttgaccaactactcgttcacctccaacacaatgaccgtcgacacctgcaaggctggttgcgctcaattcggatatagctatgccggtttgcagaacaagatggtctgcaactgtggttccgctcccacttctcgaaggatgcctcacgagaactgtgacggtcgatgcaccggtgacagcacgcaattctgcggctcctccggtttcatggacgtcttcaacatctccagctttgactcggctgggtcgtccacttccgcttcatacaagggatgtttccaagacgcatccaaccctcgtggactgagtgcttacacctggagctccgacatcatgaccaaggacgcctgtcgatcgagttgcaaagagctgggcccctacaccctagccggtgtcgagaatggcaaccagtgctactgtggaaacgcttgggcttctggtaaggtcttgcccgacagttcttgtgctaccccttgcaaaggcaacaccactcaaacctgtggaggtagcatgacagctgcggtctacaacacgactaccgcacccgacgtccgcaagtccaagccggagggatggatcggatgttacccgtcgtccgccttcagccttgggttctacagttcgtccggtatgaccaacgccaactgtaaagcttcatgcgccacgcaagggttcgcctactcgggagtccgatcgggaaccaactgttactgtgctcagactcttcccgagccttccaagcgaagtcccggtatcacttgcaacacgccttgtgctgggaattcgtccgagacctgcggagcagcctacctcgttgacacttcgaacgctaccaccgctgcccttcccgccagtggctacttgggttgttacggagacgttagcaaggtcaacaacttgacctacaccagtacctacatgacccgagacacctgcaaccgatactgcatggccaggtcgtaccccttcgccatgaccaccttgggtagtaagtcgccagtccacatcaagcatctcgatctggacgtgtgaactaacagtttgatcccccttgcagaccgatgctggtgtggatacaacaaccctacacaaaagacgaccgaggcatcgtgcagcgctgcctgtaccggcaactccactacgacctgcggaggcaacaacctgggatctgtcttcaagctcaccggttcgaacactcctaccaagttcgatctcaccaccaccggaagcgatggctacgctggttgttacgccgagggcaagaccaagctggccgttctgtcatacagtctgaccagcaacacgcctacctcgtgtcaagcgacctgcaagggtctcggcaaggcggtctctggtaccgagaacggacgcgaatgctactgtggcgactcgctcgacgagatgtctggaggataccgagtggccgacagcgaatgttcgaccgtctgtcccggtgatgcctctgccaagtgcggaggatacgccaggttgtctgtccgaatgaccgctggcgcctcgagtgcttcatcctcgaacggagctgaaggcaacatcggttgttacgagactggtagtgccatcgccaaggctggatacgacacgactttcagctcaatgtcgaccgattactgtcgcaggacttgtcgtctcaagggtttccctgccgcctcgctgttgaacggcaaccgatgcctgtgtggcaccgcatccgatgtcggtgcatcgcttcctgccaccatgtgcaccagcacctgcgctggcaactccagcatgacctgcggagggccttctcaggtggccgtctacaacaccaacggagccggtgccatgcctcctaccatgtcggtagctggttacgccggatgctttacgaacaacaacccttcggcctttagctaccagacgtcttccagtgccaactcgctgagctggtgttctcgactctgtaccagcatgagttattcgactttcggagtcagtggtatctactgtgcatgtggcaacactgtgcctacgctcttgcagacggatgccatgtgcgccaccaagtgccccgtcactggatcgaccgacatgtgcggaggttcgaataggtggagcgtcttttccagcaactcggccagcattaccacacctgctgtgagcagcaccgtggcttcgacctcgactcgggccagcagctccgctactgcttcgtctgtcgccgctagttcggctgccagggtttcatcgtcgaccgcggtcaggagtagcactgccgctgtctcttcaactcggtccacttccttggctgcgatcgctccttcctcgtcactggtcacttcccgggctagtaccgttgccgccggatcgaccacccctgcttcgactttgcgagtctccagcgtcgccgccggatcgaccgcgcctatcagttctaccaagcccgtcacgtccgtcgtagccgctacttccaaggctgcgacatcagcggctgccagcaccagggcttccagcattcccggaggcgtcgctttggtcacggacagcactaccgcccaagcctcgcccacaggttccgccagttccgatccttctaacaagggatgcttcaccgccaaccgcaatgtcatgtcttcgttcgaaatgaactgttcgaccttggatcccagcatgtgcaaggtgagtcgaagaagtttctgaggatgattcccgagtctgatgctgactcacgatgttgctgcagcttctctgtcgatacaagggtttcgcttacgcggccgtgaccaacggtgacacctgtctctgtggtaccacgatgaccggactctcgagcaccaactcgtgtacgaccgtctgtacgggagacgccaagtcgacttgcggaggaagtacttcgatgcaggtctactctacgggcgacgtgaccatgcccgctatggctgcgaggaagcgaaaggcgcccgccgcggtctctccgcgagaggctgctccggccgtcgtcgcaaacaggaggaggaagagcaatctgatcaggaagatcagaaagtcttcgggtttggtcggatacgcctcgcactaggttcggggcttctatagatgtttctcagtagagtagtaagactttcatacgcggagagacttgtgccgtttcgcgacgtgcaaattgactctatacacatatcataatttcgcatgcactataccggtcggatcttctcgagctgactgaacaagtctcgactcggcgtgagaatccggaagcggccagtttttgcactttgcgatacccaacaaggtttcttgatggggccacggttgcaggttgcgatgatcaggaacagagattcggtttgttcgatttaaagaaataagcgagtcgcgcccccaagcgaaaatccagcgaccaaatcgccaacctgttcggctcttcgtggctcaccagctatctctcattatttgatcactgatatcaacaggcttctgtgagcggcacaggcttttcggacactatcgacattcaatcgagttccagcccactttcactttatctcgtctcgatcaggccttttcaacatgctgacaccgtccaggaagaagcacttgggcacggcagcggccatggccgtcggcttcgtcctgggtctcatgctatgcggatctcgttcagaagagctgtaagcttgggcttttcgaccgactgggctagtctgacgatctccatcacatgtctagtcgccaacaggtcctcaatctcagccgcctcgatacttccctaacgaccacctcgcatggccagcacgcccggaagtgcccctctcaatgcctcgacgacccttacgtcaaaccaggaatgatcatgtggggcaaggaccaattcggcaaggagactcgatacgtgcccttcccctcagagggcgggcgactgccggtcatgaggactaaagagctcgaccagggtggtacggcttactggagcaacacctcggaggccatgcagctcgctgttcccgggtacactcaagctatcaagaacaaggaagaggacgtcgtcggattcgcgagaaacaagatcgcactattcatcggtgagtccgagggcgcatgggacagcttgacttttccgagcgaacggctaacgatcgtttgtgtctggatggcgcagggtcgaggtgagcgagcagtcacacgatgtgcatattaggtaatggctgtagctgatgatccatgacgatcatctcgtcggtggcctttcgtcatagtcgtaagtcggcgactctgacgtgctagccccaatgagactctgaccagactcgacctgttcatgctccgcccacagacgaccgagccaacgtcagtacccacctgagtctgggattaattgacgatgggtcctcccagctaacgtcacgaaaccccatccttcacgtctctcaactgcaactcacgtattgccataggtcgaaacattctgcattgccgtcggaggaaagagccagaactttggctcgcacatcgcagccgtgtgtcacgtagactggctcaacctttcgctagcaagttggttcctgtaagtcgccccatacaaaccttattcgatctaggatccaacacactgaccgattgaaactcgtctcgctgccgtcgcccttctacattgccaacgcctcactgtcgacagcgttgggatggtcgacgacgaaggatccgactggtttgtctctggcgagaaacgacccatcacctttgaacgacgtatccccgaaatcatgttaccgtgcatgaaggaagccggactcgagaacatgcagcccgatctcatcgtattcagcagtctcttctgggacgagagttacatctggagggtgagtcacacggcacacggccaccttcatggtgataggcccatcatgctgaccgtcggttgcgacttgctagcacggtatgcaagtcggacactacaacaccgatgtcacggacggcctgcatggcttcttctacgaggaactcaagtggcatcgatcgcgtatccaagagttcatcatctacatcagatccatgttcggggacgatgtcccgctcatgttccgaaccaggcaacaccgagccaagaacaagtggggaggtgtgcttaagattttccagctggatcaaagtattcgagcggtagctcgagatatgggagtgcgatactttacctggggtagcaagctcgaggggtggctcaagtgagtccacgagcgggggacggccagggaattggctacgtgtctaactttgatcgccgcgtctggtagcttccaagatgaagatcagcactacagcttcggtcccacgacttatctgttcggagagtgagtctgatgagcgatctggttagcgattacgaggtgaccgcggctaatctagtgtgtcatgatcatcgtagcatgttcctcttctacttacaccaggcgacggttccgggttgttgggattgtcagctcgatctcgacgtcggtttcgagggttaaacgatgtacgctttttccagattgcaaatatatagatgttttgacagcggtgaaaacagactcgcatcggcgagatcgggagcacgtcattccgattgccaacttcccggcgtcttattccccatacccatactgcggtgtgagaatgaccagggcactcgatccgtcctcacgtaactcccaaccgaatgtgtatatttgtttccagcaaaccgatcgagtagactacgtgatcaatctcacctcgcccctgcgagccccttctcgtcaaatcacatggtcaacctgacagtccctcccgaggctcggcgcatcctgcttcgattggtatccaagtagatcccggaagatggaatcttcaacattgcggacatggtccatgcacatgcatctatttagaaagctcaaaccctgtacaatcacggccattctttctatttctcaccgacgagctctcataagtagtcgtgattacgcgactcgtccagcatcatgtggaacatgaggtcggcccaatagttctggacgcctgctcgacaccaatgcaggcaatccccgatcggtgctggcgatagtcgagcgaaatctgtcaggaacgacatcacccaagaacggacgacatgaccgactcacccatatggccatccgccctctttgccgacatgggccaaacgtccatgaccctgaaagccgggttatgccccgctgcggattcgacctggggatcggccatgaaatcgaaagcacccgattccctgatcgacttgcgtgccttccacatgactccgttgaagcttgagaacagtgcgctgggagcgacaagtacgacgattagcctcgatgagttagtcggtagatgaaacgcggtgtgctcactaattgtgctcggtcctgtgaatatcagcctgggacctccatcctttctcgttgttatccgctacagatcgccgaagcgtcagtggatcgaaacgactcgcgactcgacttcgccctgattggaaggctgaaactcacgatgcaaggcggtggaacatcctacatgaccgggcgccagcgtcctgatcacgggtgatagggggatcggtgcgttcttgagcttttcctccatcatgttgacctggcaggacggaagggtgacccgggacgtcattagcgtcgtgtctcgtcggcacgtgtcgggaccctgatcgtcgacgtacaatgttttccacgccctcgagccaatcggtgccgatgaggtccttgcccaattcgtaccatacgagatgcgctcccaggttcaggacgatcatcgacggttcctcgagggccttgctgtcactcctcataaactccttgaccttggtcgcttgcgcgagcataggttcgtaccaactctgcccagaaaggtggttcgggtttaggtcgtacctatccccggcaaacttgaaggcttcgagcttttcctcatccgtagccaggtgatgatgtctccagaacttgaccaacggggtcttgagcctttcctcggtgaccccagcttcacgtaacagttccgggatgtcggaatgattggcaacgatgttgatgccgttctcccacatgcccgctcgggtcatttcgagtaaaccatcctccctgtctagcatggtgatgaggaccttgctctgatgctccgtcaacgagtctccgatcagcctgcgagcggggggcggaatctcattagctcttgcgacccaacggtgcttggcacagacgaaggactcacacgagcccatttctactcctcaataaacgcttgatcgtgttcctcctatccggtttcaagaccgtacacctctcgccttcgcgatcctgttttctctggcgcggcaggaggtacggactggcgaccttgatcgtgcgggcgttgatatcggggagttcatactcggacttgctgccgttggggaagacggtcttgtggatgatcgggctacattcgttgacccagttaggctagagatcgtcatgatatgacatgggcggtgggagggagaatctcagttcgagcgtgttcgccggggggcatgtccaagccgacttcgaacttaccgccagttgatacctctcggtgacctcttccatggaattgagcggcttgtcgtcgaaccattctccatagacgatatcttccacctgacagacgttggacgtcgatcccgacgacctggacaacgccgagagcccgttcgaggtccattggggtggggcgataccagtaaaactgtcccctagaaaaccgtagagaacgactgaacagccgatggcggtgcatgcccataccaagtttcgtgagcgggtcattatcaaggtgattttgattaggtggagacgaatgatcccgggggccagtggtcgatcgggtcaaggctgtccgacgaggtgaatctctcttggtgacgacggactcttctttcgaaacagttccgcggggccaccagcgactatatcaggatcaaaggtggtggttgcctagatttgtgtcaaactactagcaataccagctaggatgttaggactgagaataacgtctacaaccaagtgggaatatcgatatgtgtctcttgtgttccgggcaaaaacgtgacggtcgcaatcgaggttattttccttctaccaccatatctcgctgctccttgatgatggttcagatctccttgaatcaggtaccgacccacccaccaccacctaccttagcctttagcgagctagcgaaagcgacagacggggaggggcaaggcgggtcagcaggggaatcaagtcggggcccgggaatcaacttttggaacggcacgcgggcgacgggcgagcacgggggaagggtgtgtgtggcgtacaatgtcggcgtggaccgtgatttccctccggaaaaggactacccatgtccctcgtccctgacccgcgagcgaacaataagaccttatcgaaatgaacaaggaaaagaaagagtcattcccatagagcatgggcccgcagccactctgcagcttaaactagtgtgtccctccttgctcccgcttcactgctattcctgcggttgtgggtaaaggcaaatggcatgcactcgacacgcatctatattgatcatttccacgtcggtctagcttttggactaaaaagatctgcttatccttcggttcccaaatctgaccgcgtccgagatccgacgataatcgtacaaccgagcttccctcactcgctcgctcgctcggcccttaccactcgccatgcaagggctcacaccgcccgatcttgtaacacctggcgaccacgtgcctcctcagcggggtcgcatgctgcgtacccgtctcgagtacgagctcgccgtacgacttccaatcgaaccgcatcagatcgtccatgttcttcagttcggcttcgtatgtcatatcgggtgggatgctacaaagtccgggggggatccaggtcggatcgaaggatcagctcggcttgcagagtagcgccaacaaacatgtacggaactgtgacttactatcgctcgatcgggtgcgacgccgcttgcttgatcttatcgatcaagtcgtcctcgtcccccgtcttgtaggaataaacatatggcggcccgatggccgctgcgggtccatgttgagcgtacgctccattaaagagatcccaaccaggcggtacggctacatctttaaagtaaggaatgaccacgggcgtcccttgacatctgtgcgatgtgtgcgtgcgtgaaaatcagtaccacagcgtttcgggccggttcgacgcacgctcgacacccacagtgcagagtagacggacggactgatcaacggtcggccgatgcccagcatcaacttgctcttcgagaccatgacctcgaactcggtcctcgagaccaaacccgacgagtggacgccttcgggtaaaggttcctctcccgaagcgacgctcgagacttcgagtcccgtttgattctgcaccttggcccagaacggagccggcacgctagaccaggggtcttgaaagtaggctgattgcttggcgaggacgaacagcttgtcggccttttcgagcggggtgacttggggtgctgacgcgcaggtctgttcgatcgagtaggggatgtacgaatggagtgggtaggcgaacgggctaccaaggttggggtcgaggtcgtaagctcgaaacgtcctcgtatcagagggttcaacccggctcgacactcacgtcaacgtccattgctggccgagagcattccatgggaaatcctcggacgtgaaatcccaagctggatcttccggtcgagctccccactgtcgacacgctcggatcagcggtcttgtacgaggtcctcggcccggttctgacgcgactcacataggtagtggtaaacaacttccacgtcgggatcgtcccacgctcatcttctggaatcgcgctcagatcatgattcaaccatgcccatcgctgcggtttgtcgcgcgggtcggaccggatatcgtcccaaaagtctggcaggtgagtcttttcgtcgacgtcggttccagggtacttttcgttggtcggtttgaatgtggtgaaatcggcacagtacgggtcgtcctgacatgtcagcgtgtgcttgtcttcggtccagatttgggagctgtagacgtgggtcgaccggacaagttctgcttaagagtcggactggccagagacatcgcgaccccgccactcacatgacgtcgggcatggccttgtgagccttgatcatgcccttgtacgtgttggtcgagaggatcgtgtatcccatctcgtataatgctcgcatctgtggtacgtgacgggcaccggtcagccaatcgggacaattcgacccctttcgaactctgcactgacctgatttcgtaaccagacggctaggacgagccccacgcatatccagagtcagtcctcattcgagcgcgagcggctcactcctactcacattctcctggactctgcgaccaatccccatacgccattgtgaaataccacctacgcattcccgacacgctgatcagcgcttagcgtcgtacgaggccagtcacgatgagtacgcaccagttaccgaggacaaccttggtactcgtcagactgcaaggtcttgtatcctctccgagctcgtcctgcacatcggtcaagttgagcgggacgtgtggcgtctcttccgtgtatgctgggtattctttggagagcgtcgtctctggatcgaggagacaccgccgtagccgtgctacggatcgcttattcaatgaggagagtgatggccagaaactatcgatcaggttggcgtcgaagtggttggggtagcagtatcgggttgacgagtattccgcgttcgggtcgtcatggccatggggaagaggaatcaaaagaagcaaaaggtcgaaccgagatcaaattccgtctcaatgctagtccacaatcgcgacacctctcgactcactcggcatcctcatatccccacccatcgacctgtttgaccatcctcgctctccaacaccccttttccgtgtactcgtcctcggcaccttctacgtaaccctcacatagtccttcatcccgaccggagagcagatcaaacaggcctcccgttgacgctgatgatgacgacgaagtgacacccgggtcgaggatctcttcccaattcgtcgtactggacgaacccaatgtcgctctccttcgactcaacaactccttgcctaacctccccgggacgtatccctgccccgcttcatcctcccttgacccgctcgtcgtcttgcccaggcggccggcagcgagttccatgcccgctggatgtcccatgaagatccctagcccgatgagcgcggtgacgagtacgatggcgtactgcctgctcctccatctcctccccttgacggagcccaacgagttgagtgacgatcgacgggaagaggacgtgcttcccgaggctcggccatggtcggatgggggtaaggggaggaatggatcttgttgtgcgagtgggatgtattcgggttcgttgctaggcatcctggagtgcaggctgtgtcccggtcagactgctcgttaggtctgttcacgtaaggatcggaattgaagtatgtcgtgtagggtgaggtgatgatctctagcaggaggatctgtatcgtgggtctacagggcgacgatgaccagataatgagagagttaggtcgatagtcgctactcggatcggagcactcatcgagtcgatcagacatgccagacatatcacgatcgccttcgttcagtcacgaaaacatcaacaaactccggcctctaccgcaaggtcgactgcggattttccaggagaaagagtcggatgtaaaccgcttccggcatactcgtcctgtagaatatatatataggcccagagtcatggccatggatcgatcgatgtgtagattgaacagggtttgcatcgactacatgctacatggtctgatagttgggtcaggaattgcgacacccacggccttgcatggatcgactcgatccgagaactcgaaattgtggacgaaacgatctcgcggaggtttttgatcaaacgccatgcgtcgaccggaatgttcataaaatcgatcagggtgatccagtctcattcccgacgctccgagtcgcatcacttggcatcgaatcagattaatgctcttctcatgtacacctccagatcttcacccattagcatgtcgcatgtctgacatgtcagtccaggcaggtgtagatggcaaaattggtcattacgttacgctcgttcgtttcccggcaaccgcgcgcgcgagatcagggaacaaaagagaaaatcgctccgttgcccatcgagaaaccgagtttcgcattggacaaaggacgggaaacgaacccctcctttgaccttgcagatagcgaggcgaggcagttaccccaaaggagattgcttaccctgtgatggtcgggaagaatctcggttctgacacgcgatgccgagtgttcatggaaggaaacgttgagcttgtttcacattgtcgctcaccgaggccgaagggtcgcgggtgagcaggggggggggggggggggggggggggcatgctagaaaatatgacgtaatgggtgattgcgacacacgggatctgacaaaccgagatccctcgagcaacactgcacaagtgagaggacaaagatcgcaacgtctcacaacgaatcatcatgtcaccttgaagtgtgatcacatcgacgacgacgacgacgacgacgacgacttgtttcgatgacatatctacctcgctcggctcgaggcgaatcgcagtcgaactatatcagacaggtcgaggtcagagtcggagttcaggtcgatctaattaattgatagtcaggtcacggaggtatcacttgaatgacgtgtcaaatttacttttgtttatttcgcaaaccacgatgacttgaatatgatgacgatggatgatggcagagtgacgtggtaacccatccatcccatccacactacacaaacacctatcaactacaaatctaccctccgacctaccaatcgatcacacctcggcaaagcaacgatcaaaagaggaacactccccgacaatgtcgtccctcctcaagctcgtccacctggaccaaccctggctctacgcctcggtagcgaccatcctattcaaccccatcttctggaactttgtcgcgaggaacggtaagtccaaggagaatatcgtcgtcgtcggcggcgcgtttcgtctcgtctcacatcactgcgatcgcaccgaggcttactctgtatgaaacgcctttctctctccgcatacctcgatctccctcgtcctcgtcctcgtcctcgtccgccgacgtcgcccgtgcacgagcagaatataggaacaagagcatgaccaagatctttggaggcgcctatcaaggaacctgcgtcctcgcgttcatcatctttaccctcggactcttccgggactgggtgtgagtcctgttgtctcgtcgtctcgacctgcccattcaaccggcactcgacctttcagggataacacgtcggaatgccggctgaccaccccgcccgtcacatcacgacaggtaccaccgagccctctccacccaacctcccagccctgaactcctcaaccccctcgtccgcgcccttggcgctctcctcttcatctccggtcaactcctcgtcatcacctcgatctacgccctagggctcaccggtacctacctcggagactatttcggcatcctcatgtcacaccgcgtgacctcgttcccgtttaacgtgatgagggatccgatgtataacgggagcacgatgtgtttcttggggaccgcgctgtggaggggtagaccggcaggggtcgggttgagcgggttggtgtacgtggtttatcaagtggcgttggcgtttgaagggtgagtcggatgtggggcgggggtccaaagaaggggtcccggggcgaggctgataggggttccttctctgcttgcctctttgtgcgtgggtggacggtactggattagaccgtttacggacaagatctactcgtcggccgctgccaaaaagaagagggaccaatcgacctcgaactcgaactcgaactcgaacaaggtcgcctcggctcccgtctcggccagttcgtccggtatctcccggtccagcacgtctgcaaagaccaggtccaccggtcccagcgacgaccacgttggcgccgacgactcgtcctacgcctcggcggtcgccgaccaatcgtctaccaactcgcattcgctcccctcgaccgaccctcgtccccaggtagacctctcccatctaggcctcggcgcgcccatctctccttccgggtcggtcatcccaggcgtaggcgatcccaaactcggcgtcatggatggcaactcggccgcggtgtcgtcccccacggggaggaacgctgcggggaggacggtcacgaggagtaggagccgggcgaggatcgtcgatgatgattagacgacgatcataaacccaggcggactagaccgcatggacaggaagggaggaagggacgcactcatctgcgtctgcgtcttgcgagagcggcgcgaggaccgactcgccgcaaggagatacacgacgacacgattcataccagttatacaggaacactaaaaatatacaatcaagatgaacgacaccgacgatgacgacgaaccagacgatttttgaacctcgatccagacgatacacgggagggatccatccgctggtcccgtcttctgcaaccccgatcgtctcgctgacgagcccggtaaatctcgacgcacgcgatatggggagaaagggacgggtagcgggatgaaatgttgtacgaaggaacgatgtgacgaggttatacataacgaaattcaactttaaaagtcccgagtgtctcggggtcggagcgtgtagggcaggcggtgggtagcttcggaaagagcccggggggtgccgggggcaacgcagacaccgattcatggtggtctcggtcccaagagagcgctcgaccgtcgagtatctctggcggttcgcttcatcctttccagtcgagccacttgctatccgctagacgtcggtcgggatcgagtccacccggcttagctccttgctctgcgcttctcagatccactcggatcagatgacgacgccatggactcacggacaaacaagctcggcgccgcgcatcccctcgccaccgacccgtcgatacctaccccttgctgacgagagtgttgacaacagcttcgaccctgaaagggctgttcgactccagccggggcttcgatatcggcctcgtgatgctcgtggttcgcatcttgttcaggctgaggttggcggtactcagacagctgagattgtgggtctgactgggtcgacgagggagacgattcggcggactcggatgaagagttggatgcaggaccgtgcatctgtagctgcattgctactgcatattgacggttgggtttgttgtacttgccgatggtctggacaatacatcttcagtgctcaggtcggtaaatcgaccaggccagacttaccgctgactgggcgtgatgagctggagtggattcaggcattccgcaaagtgactgtctcgatcagagggcgatggtgattcttgtgcaaacctacagatgatacaagcttacatggtgaacactctcttcgaaactggtctggtgactctatataattcgctcagacgaccatctcccctcgatccccttatctcaccctcgcctttgccccctgattcccgtgtccgattcccaaggatcttcgacatcaggggcaattccatagcatatacgaacatctcaccattcctatcggctggacgatctcactgttcaatgatttccccctctctttggtacgatgatcctttctttttccctccttatcgcttgcgtctccttccacgctgagccccctgttttacctggtctcgcttcgggaaccgggccacgcgcccgtttgaacctccgatcacgcgcgccgatttccattggcgttcccggtattatgcatcatcagaatgcctttccgacccctgacaagcgcttgggccatttcgcccataggtgttgtatctctgggcctgggccttccttctgtccaaggcaccctggcgcttcagtcgatgtggcgttcgacggcggggacggacggttcccgtgttgcgtctcagtcttcgccgcaatgccgctagacagcctgctttctcatctgaatcttcttgatccgagctctcctgcagtcttcttatcggtcggcgtttgcggctttgcttcccagaccttgcgtggagaccttgtgacttccgtccagaacgccttgtcgagtacgacccgtccaagcttccagcgaaacttgatcgtctcggacgattgctactagattcggttgttgctgtcctcctcgtcaagaccgatgtcaagtctttcagccaatccatccactcagagaacatgcccgagagccacgacccttcagctcgtccttctccttcctcggtgtcatcgaggtttcgaggcatattggacaactttgtgatttcgttctcctgccccgtatagagacttgcgtccatttctgttccgaaatcagcttccaggtgctctatcgaagggttcactcggttttggatcgaaaacgagagaacctcattccaatctcctgccatagtgtccggatgaaccgttgttcgatcgcgaccacgcatcatctcgacataaaccggggggtctttggctgtgtccgtctcacgagcgacttctctatcggctcgacttggacagccgttctcatcgaaatcagcttttggattttggtccaattcgtcggcttgactgtctccaccatcataccctttgaagtcagattcgatagagtcccgccagcccggcggagtcttctcgatcacgctcgcatagattttctgggatgccatctggttcccttcctcatgggctaaagctcggagaacttgtcatcagctaaacatatttgcatacggtatcaactgtacgagactgactagaatgacactcctgcagcatcaattcagaaagtcagaaaacgctcgacgcttgacactcatccgatcagtactgaccaagcggtgcccaggtggcacaaactgctgttctctctgctgctcggagctcacgccaaacttcaagtccccccttcctgagttctgacatgcctcgatcatagccgcgtccaacggacttttggtggggatagccgatcctgtgggaaacctggatggcttgcgatggggcgatcttccttctagtttctgaagcgcgatcgcgacctcgtcctcatcgtccgcagggtcgccgatcgttgtcaccgttaagtctctgagagtgattggggttgctcctttttcatctttatgtacagcgtgctgagtgacgccactccgatacccgcccgcgcttactggggaaagcctcatgatagatgaagggcatgttgagtctcgctgatgctgcgtacttccattcccgatcgatatcgttggtgcgaaggaactatcggatgtctgcgtcccgaactgaggggaggtttcaacgctcgggatcgcggtatcatgatcaacttctattggtttatgcgcaagccagtcaccgtcagaaagctgactgggcaatgagctgcaggacgaccttgacttcccttgttagcaattcgaaatcgtcaaagtcagtactagctacacgacagtcgagtccaaatagctgacctgccgatcctccatggggagatcctgcgatacgccgcattgtgctttcaaatagatggcccggagaaaaaataggttctcatgtcatgggtgtattaacttgtcatttctcgatgagagtatcctgaatacatcacaagtctcttaaggcctccaagccatacgacgagactgataaccaagcaagtccgcacaaaggagtgcccgtctctgtagacaggctcgggacacgtgatgtttcagcatgacgtaggatagcacggcacatgagatcgagacacgcaaacattccatttgtacgatcggctgctacgcacatcatcaatccggacacaatgtctaaaattgggatacgtcaggttttgtcatagagtggagcacactgatataatcgtgcgtgctcaacaggcgatgatacatatgagacgagcattcttcggcgtcgattgactggcaacggaactgcgcaataacgtcacgttcgcagaacgccccaccgaaactttgattctctgtggtggtagtagtgtaacgtaatactaagtgtcagtgacgatcgcgtttccacttagggaaagtcagcttgcgccttccttgagccgcggtgatcacccgaggctttcgaggcttctcgatatggttgtcgaggtaatcgtcaggcagatcccattctttttggatgtcatctcgactcttctcgcagccatccctattgactctgtctataaactcgcgcctgctatcgatgatattcgctcgacctgatctaaacttccaccaagggggtttgcgccatctccactgcatcccccgcactggctttgctaccgtttgagggctgatatctttgccttcggaggagcttgtcgaccactcgcttcgactgtcatcggaggtagagggtcgctgctcattcgtctggagagtgctgcaagcgcttgagacggatcgcgctcgatgtgcggaagccgaccctatccctgcagtcgacggctggctggatggacgactagcaaccggggtctcagtgtcactgccagagcttgccctgcgattcatgctcgatcttttatcaggatttcttgactgaagccagcggtcgctcaaataatgggcgatttcttcgctcagaggccaatcagcactaagagattggaagtcgtcgctgactgtgcttgtaggacccggatcttgcagagaggattccgccgacgctgacgaaacgaacgatcgacgatcgatcctagtcatgtcctggcttgtttcggctttctggtgacggcggagcgagaccaaggtccaaggtctttcttcgttctgacagaatttcaagatgggaggcgaagagggatcttgctttgtgagccaatacctgactgatgcacgtgtacagtatggacccgtacattgcatcttatgtgctggaccgtttcagtctgtgatggtactcgtaacagggtctaatcgaaactgtcaggtatcagaccagtcttcgacaaaggaagcttcaaggacctctcttcaagcgtccgaaccgctcgccttcgcgtttcggcgagtcaagcacagctctcgcaatcaggtgtggacaagcaggtatattcaaatttcaaacgtacaaagtccaagcagtctagcagtaaaaaggttctccaacttggcaacagacagtatcaagggggattttcgagtcggattcacacattcctgtttgaaaaggtcaagcgcgcaacgccctgccctgctttacccaaagatcttcgagtagagtaccaacaagatgaggaagaccaagatgccgatgatgcccgctgtcaagaatcgttgttgttgcatcctatcgaataccgggtcgcgatcgagagaaggatgtcgacgacgtcacggtcgaggcaagagagaaaaggggcttgtcgggatcagtcatgcgtttgagcgataggcagccagatcgtatggagcgtcgggtttactcacttccagatcatcttcttgagcgttccactagcccgatcgatccccgaatccgtttgcgtcaactgtaccggccaccaacaaggtcgtttcagtcgccatgttcagagaggggagaccaggcttcatacgactcacggtatcgcgggtgtgttcgatctgttccctctgtcccctcaaattcctgaggatatccgccccgacatcttcagtctccaatgctatccgatgcgcattctccagcctcctcgaacctatcccgagcggacccaatcggttacacccgatcagctatgagattcacccttcatccccggctgaagaacctcgaagaatgggagcactgaccgtcattcagcgtctcggtccctgccaacaacctcccgcgctgatcccgatcgtacccgggttcatcggaataaggctggtccgactgccccgggtgacgtttcccagccggattcccgaggaggtctgaccgctgagattccctctgaaggtctttctgtaaacgtggtcaggggtgatttccgggtatgtaggtatcagctcggtataatcgagtcggaacaagtgcgagcgggacgggtttgggggaacggtcctttgtccgtgatgggagggtgtcgaggggggggactcaccagcgccttcttgaccttgttcagctctgatttgctgctcgtcaacctcgtctggtacggcgtccgaatacttagtggcatggaggggagctcgatctccatctgagagatctgtgaggggttgtatatccgaaggtacatacggagggaaggagaaagaggacgtgagcgggaggtcaggacgggggatggacgaggactgacgatctcttcagcttcatctaattcggcctcgacctttttcaagctagatttcctctgctctgtgtcgggcgaagacgacggtatgccggtcatcgagccatatgtagacagatgaaaagacgtcgagtttagcatcaagaactctgggatctgggatggaccatgaccgtcgacctctgggactgacccccgctgagatccctgatcgccccgccatccaacttctgtttcaacgaagtcaacagggatttgaaatcctcgtcataattctcaaacaaggctctgcggagtgacgagggcggatggaggatcagtgaacggaactgggcggggtgcggtccggggagtggtaagggagagcgtgatgatgccgtcaaggcgggctcgacgtacgttggtgaattgtccatcgttacgagttcgtaggcaggctcgattgactgccctttccgcacgtagtttgaactactgtcgatggtctcttgaacgtaggagtagttagtgagtgtagggatgatgtaggtgacgaagctggtcggccaagagcgagcgaggcgaacggggatacgcgagagaaatggccgcggcgggtcaagatggctcgaccatcatgcaagcaacttgacccaaaagacatcatatttctagacatggaccatctcgacctatcacaaacacgaatgcagaagttggaaaggttctcatggtgcatacagtatgtgctccaacctcggtacttgaactccccccccattctagcctgaacgttccactactgtcacgtagtagtttcggctgttccttagccttttgagcgcgaccgattccagttcagagagacgcgaccaagcaagtttagctagattgcgtggtagaggaagagcatacaatccatctataatcaccatcgagatcctcacctctacctctactcacctcgttcatcatcctacttaccacctagtgacgttcaagagcgggactcttttccttcacccccatgtcaagactcgattgatcggtccatcctctgctccattcgacgcgaccgtacacttgcgaccccggcacgcaacacaaatttggttccagtcacgacctcatcccttgctgttcaaaactcgccgtcaggtctccccccgggaatcgctagagagactttctctctctcgccggaatcgtcatcatggccccttctttgaacccactccggccgagccactcgtcacggccgtcagtgtcgagtcaacaagggagctcacaccctttctctccttcggggcagacgaccgcatcttcgcaaggcggttacagttactcgcagtacggcggatattcaagcacgtcccccggactcgcaccgaatcagtctcaacagtctcaatcgcaaccgccgtcgaacccaccgcgatcggggagctcgaacaacctcgcctcgtcgaccggttccgcgcagagtcaatcctcgcctttccacggccgacaaccctcgggctctcgaccccctcaagggatcctcctcaacggtagatcagccagtgggagttccggggtacagcaacagcaacagcaaccgcaaccacagcagtctcaacaggtcacccaggaaaagctggaccaggcgagggatatcgccaaagtgcattatcaggccctgagagggttcctctggacatggctagagaacggtcagtcccatgccattccattcctattccaatctgggtcgatcctgactgacacgtcgcgaataccacattgaataacggcacattcacggaaacgtcctcggggcgattagaatcacccacctcgagagcttcggccagggaaaagttgacgagattgacgaggagtcagtttcaagagctcagtacggacgtttacgacgagctggtcaggcggagagatgccgaggaagggagttctgccgaaggtacgtcttcccacccaccctccctcattcacgatctttgggggtactgacaatctacccctatcccggaattcatcgacgacgcccaatcagccccgttcttgccggtcagggaagactttcatcctaaacgtaatcaagctcgacaaaagttagcgaccttgcccaagaaccgattcaaggatctcgggagcgacgtctactttgagcttaaacggcgttggcccgagtttgccgaggacgttcaggtgagcaaagggtagtcccgagctggaagatagggggtaagctaatgaatttttggaaaatcttggtggtggtgccctctgcaagcagtctcccgtaatcgatagcccgacttcggcttaccctccgacggcggctaatatccacgacaaccttgccggacgatcagacgagccgcctatgcccaaccaggaccgaacgcggtcgcctagcaataaccagcaatctcggaattccggccacgagacttcgccggccaagaaacctgtaacggacaggctcgtccccggtccggctcgtcggccgtcacagatggacagagccccggggttgccctcgtcgcaatctcagagcgggctgcagtcgttgagcgggaccactacaaatgatacggtcgtaccgaacaagagtaccatgacagaggagaggatcgaagtgccttatgccagggagggcagggatagtctcgtctctggggatgatagcgagatggagaccgaagaggagagggaaaaggagcgggatcgcgaacggggaaaggaacatgaaaaagctcgtgggcatcaacgacaaagtagtcgagcgagttctaccatgagccgtagtcagacgatgagccggacgtcctcccgattaggctccgccgccaatggacgataccagccggccgaggcccgcgaggacctggacgaagaaggtgactcttacagtaggaatcggaacaacatgccgaacctgtccaacggcgaccggtcatccagctatagcaactcgtcgcagatccagcgcacgagaagcgagatgcaacgagatcgtcaagcgctctcgcaagagaatcggtctccctcgatcacgtcactgtcgacggcaacggcgacaggcgggggcatggctgcgacagcgatggcggacctgatgaaggagcgcaaagctcgctcggatgcggagaccaaggcggccggtctcgaacgacgcttgttcgccctggaaaaggaagtcaaggcggccaatgagcgagaaaagtgggaacgagatcgagcaaaggaactggaagaagaagtccggggtcacaaagaggtaggtctgatccggctctgatttcgattccggtcaatgtctgatttcttcatcaatctgatacttgtggcagcggtcctcgaatcacgccaacgagctgtggtcgatgcaacgggaactcgataccgtccgttctcaagccgaatctcacaagcgggactttgagaccgctcgtcagggcgacgactctcagctgaatcactggaaggatcgatgtgggcaactggaacgcgaggcagaaaacgctcgggaacagttgaatcgggtcaatcgcagcctggacgagaatgacgtgagtagaatgacctgacattgcttgatatccctgctgactgccagcgaatgtccgcggaaacagtccgcggaggctatcaaggagctacagaacgagcttatcattctgatggaagagctcaaagctgtatccactcgaaacgaagagcttttggccgagcgggacgaggatgccgagacgatacaaaggctcgaggcggatactgccgattacaagcgcaagtgggagaccacccggacacaattgcggaacctcaagggtgagagggcacccggtacattgcaatcgaaacaacgatttgactttgtttcactgcagcgacgtcgaccatgtttgtttcgaaaccgatcaccgatgaccatatgccagcctctattgacggcaacgtcgcggacgtccacgtaacggccttccagagcgcaatcgataacttgctagccatcgctcggtatgtccgctcatctgtggcgcctcgtgagcctggctcatcactgtcgtcacgccacacagatctagtcaaccgactggggtcctgcaggccatgaaaggcgtcgtcgaggcgataaacgacatttcggaagatgttcacgactgggagaccgagccaaatttcaccatcgatcaaactcaactcgacaactgtaaacatcaatcctcggcaacactgaaggccttgatgcaagcggcccgaaatcatgccatgtccgcgggcttgtctccgataagcctgttggacgccgcagccagccacgtctcggcaaacgtggtcgaaatcatcaagctgctgaagatcagaaaaacgatcaagaccagcgcatcgacaacgtctctagcacgcaagagtttcaccgaaatgcaagcgagacgaagcttttcgacgggctcggcagtcggcgcaaagggcgacgacgcaagagatcagcgctcaccagcgcctccatctcccggcgaatcgctcctcagtcccgcgcaaaccgcgttcgcctctggaccacctctctcgccaggattccgcggcgcacgggcggattcagtcatatcgacttcgtctgcgggacaacgcagcgacgctttcgacttggatcgcaaagcgtccgtcctgggcaataggcaacagcagcaattcgggtcggaccttgcgccagcgttgcctgtgcaacgacagacatctgaacgctactcaccacagccgccatctgcatcggcgacggcaccgcgatcgtgggccagtccggaatcaccgtatcacggccgttccgacgaacgtagaatgtcttcgccaataaaatcgcccgggatatcaagctcggacaggcggtctcccgttcagagcacacaggcttcgcaatcgatgtcagagcagcggcctcgaaggaacagtggagaatgggaagaggtcaaggtgagagccatcgccggtcacaatatcgattacaatcgactgacactgtgtgccgatgtgcacagccgtatctttctacccaatcttcggctttggtcaactcgattcaacagctattggccgagatccggaatggcaacaacgcgaacgggacctcttctacgtctgccctcaatgaccatctgtcggaagtgatagccatcgggtcgtccatcgtcgccgtagcgtcaggcgtgctgcctaatgaggacgatgggccagagggggtcgaagcacaacggctcttgtccgagcttatgcactcgacggacaagttgagcactcaccagagcgccacggagtttacgaaagctgcaagacaggaaatcgccagtgcagcctttggcatggccaaagctttgagaggactgatgaaggtacaatgaagcgggccttgaccgttacggcttttacgatttcctttcactttacgacacattcgaactcgcttcagctccttttgtaatctttaccagtcgagccgcatgtcgtttcaccggtgcctaggcttgtaatgcaaaacagaggaatgccccggccaactcacggcggggctatcgcaagcggtacgccacgctgaattggtaacagtaacccgatggaaatgcagatcagagggatgttgatatgaagaatgtggtgaacattatgcggtacagtttctgcagttgcaatttacaagcggattgacatcatcggctaggaacgaaatgcttcgagcccaaagcgagcttttgccgttgccgagctcatgtggggttgccgttttgaatgagagtatccttgagctcagaaggatgaggtggctggcaagaaggcaggagatgagaaaccgcacgatcggactcagcaacagccagacataccaatgtaccgggctgtaagccttgcgatttaagccagagctgagcgatatgaggtcagtgaggtgatccgctgatagcgattctttgcagcatacttacgtcgtgagccctgttcatccttgcctgatgtccttgccaagctgctacacacgcccaagcctgcaaaggagcagaagaagtcgtcagtgctccgatgactgaataccactgacgcgatacgctaatcactcacgctgacaccgatacagctggccacgatcgttcgctggagaatatcgccgattcggaacattttgagtctgtactagagtgcggagaggatagccttgatcgtctaattgagcagcgatttcgagagcgacatcgagatctaggcaagctcaaagatcgacgatgaggcgagtaccgttctcccgatggtcttatatccacccgggatccgccgcgtccatggcttttatatccccctagatctcgacaacaccatgcgatattatatgctgaacagtcaggtgcttggtctagatgctacattctgatgaagatgcctagatctagtagcagttctattccgaatcctcattgtcttcttcttcgctatcatcatcctcgagttcttcctcatcatcctcatcttcgccggcgtcttcaccatcactaccttcgtcgccaaaagccgtcagcgcgtgttcatgaatgttctcggcagtaatccagccccccgagctgaagtccatgttggcgcctcccgaagcaccaccgaagacggtagggaaattgggagcggacggatcgctcggagtaggatgaaggttcgcgcagtccgtgaaggcgttgtaaagacggtcgactacggggttcccaaccggattagcatgagcaacagtcttgcgttcgatgggaagatggcttacgagaagcatcgtctttgacatagatacgcatctccctcaacggctcatactcttcgtcgttctcctcctcctcatcggagtcagctgcaggtggttccacggacggatcggcgatctggcaataaagacagttgccagtctcttcgcttctggatacagcatgtagcgtgatcttggggtaagccaacgagaagccggtattggcatttgcagattgcaagaaggccacggaactgtgagaaaagcacacgctgatcaacatatgcagatgaatagggtatgaaaccagactcgtacccttcagtgacccagatgtctcctctcaactcggtctggttccggtacgcgggatcgaactcgattttgacgccctcttcattgaagcgcaggacaggaggaatgtccgtccatgatgcaggtgttgttgatgtcatactgacatgctcttcccgcgaaatgaacttaggtaccgaggtgatcggaatcaaggcacccggacgctcatcctcgtcagcctcagccgcagaggctgcaacgctgtgagcgagctcttgagtcgacgccacaggcgtcacaatatgtgtttctccttcctgggcggatgcagtaggagcggcagattgggtgggtcctgctttggaggggtttgacggcttggactttgaggaaggagtcgcccgactagcaaaaagcccagatacatgcaaattcaatcagttacaacggatgcacatctaaattcattcctctacatacgatgcgctctcgggttgtacattcttggattccccggagagagctgccttcaatttgcgaatcgcagtagcgtaagggcctgttggaagaggactcgattagttgtgatcccagtcgggaatagtgaagtacgacgtacccggcgttgtgtctgcttcgtccaccaactctttcagcccttccttgacctgtggccccatgttcttgctagcagattccgttacgaccgcaagtgcgttcaccacggcaggagcgatctcgctatcgacttgtctagccgaggtgaggagctccgtgactaacgggtcgactcgtggctggaaggaaggataagcgtcaatgatcgaagatcaagatctcgccagctaagaatgacttacctggtgcttcatcagttctccgagtccggccgcggccttgctacgaacggatgaactggcggtgtcggtgacactcttgatcatggttcgggtcaactgggggtggaacggtcgcaccagttgaggcacactctggagcaagaccgtcagggtagacaagctgtgacagagaatatggttagccatatcgtgtgatctatcagaggcgcgttgtcaactcacatagctcccttgatctgtgctgccaacgttccgctactgataactcggatcaaaggtccagtcaactggataatgtacggcttgatggctgcttctgaagttcgctgcacaagatcgccaatcgcgagcgctgcttgttccttttgctgctcggttccactcaaaagaccggccagcaagatcggcacgacgggctgggcgcccttggatcttgagaacccagacacttcttcaccagccgctgacaagttttcaattcccttcctaagaggaacaaccaagtcctccagttcatccttgggtatggacttgacgagagcatcaagaccggtccaggcaccaagaacgacctcttccgagggatcgttgaatagcgagacaagctgagtcacccagtccacccgataatcagacgcatcaacttctgcgacttcgcaaagggtagccaagatctggcaggcttgtgcctttcgagcgggtttgccctctcgagccctgaaattgagcagaaggacctgtgagtatcatgatgacaatgaggaaatctaatcgagcttaccagccaagcaagagcatttgcaatgtttccatgccctcttcatcttcaatagacgacagcaatgccctgatagccgtttgcacttcggccttgatctcatcgtctttttcgctctccatcgatttgacaagcggtttgagaacgctgctcaatcgtttgctcagggcttcgccagctacggtgaccagtgccgccagagctcgagcgttgaaggcggtgatcggttgagccgtgagcgtaggaaggagtgttgggaaaacggtggtggctcgaacctgatgtagatggaacacgtttcggaataagtccagaacggggagacatgaaatgtacaggacttacgctcatcacttccttcaaagccatcaaagcggtctcagacttctctccgggaatgcgcatcgcttcgagcagagtagggatagtgcggtcgatggtcttgggcccgatggcctcttgaagcgcatcgaaagcacgcgcagctgcaatacggacttcggaatcctcatcgatgagcgcggctcgcaccgcgtcgataaccgtatcctcgtgagcttccagatgatcgctcgaagtgttctcgatgagttcggccaatgccaagcaagcaccttctcgagtacgcggcatcgggtttgctacagcggagcgcatcatgggaatgatttcgccgatcgtgcggtcaccactcttgcgacacagctcggtcagggttcggctggcgacgtcacgctgggcgttgacttcgctgcccatgagatccaccatcatcttgaacagagtgggaagaatctcacgagcagtcttgggagtgttgtgcacgagcgccttccagatatggatcgaagcttgacggaccgatccgacgtcgtcctgcctgacaatgtacaggatggcaaggactcggtcgcggccatcttgacccagagcctcgacaagtgcctttcgagcagtgtctgcgtgttgcgcaggggcttcgtcttcttcgatttcgacctttccgctaataccggtaaccttgtagagcagttcaccggtaagagatatcgaggactgtcggatccgccacgagggatccagcatacccctttcgagctcaggcaacaatagctcgatcgcacggctcgcgtaattgctgataatcatcttaccagcacgcatggatgcctcccggacgtattcggactcgtcagccagacctccaaggataggagggatgattcgcccaaggtgtggcgcgaacctttgaccgaaagttgccggcagatagataagcaacgagatgaaaccctcccgtacgtacgggcgaggactggatgcgctgttgatgatgtcaggcaggagaccctccattcgcccaacacccaggccggcaagaacctcactgagaccttgtgctgcaccctgtctgtcgactccgctagtatcggatcgcaaagtctgcaacaatttcgtaacgagcgaggggaaattctcctcgccgagacgttcaaccaatgttccaagagccttggcagcggtagcccgtgcttctggtacaggatcgacgagaacggcttgaattaggggcaaaagctgtcccaaataagggatgaaatctctcgattccgtcaacgacgccatgtttccgacgattaacaccgactttcgcttcgtttcggagcttctctccttcagaccacgatcaaggataggaaccaccaaggcgagcgatggcgagtccaagtaatgctcgaaagaagtggcaagcaaggcggtaagagcagttccagtcttgctggtcgggtcggcaagggccttgagtagcgtaggttgcaatttcttgatctccgggttgctcaggacttctccgaacgttttcagactggtattggcagcggtacggacctgcgcatgcgagtcggttagaacgcccgtcaattggggaataatggtaggcaacgagtaggacaattgcttgggagcgcagaaagccatggcaccgagcaactcgatggatcctttcttggttctccattgcttctcatccaatccggacaatagcaaaggtagaatttgcttgacgcagtggcctgatatctttgacatgatgaccttggctgcgtcacttgtagcctcacggacgtctgcctgcgcatcaccgaatagactcaataggccaggaatgatcgagatcaaataaggctcgaaagcgcgtccgagagtcgaggtcaacgtctcgtaggcaaacaccgcaccttgtcgggcctggtagttctttttgtcctgggtagattcctgcagtctcgacaaaagctcgttttctgaaaggaccgagagtccacgccctttcacaagaccggccagtccatatgcagcacctcgacgggccgcgtatttggccccggtcgtcaacgtctcgaatagccggtccaagaaggattcggtctgatccgcggcgactttaacgagaggcggaaggcaatcagccaccgcaacttgaacgatttcggacggtgtctccaaagcgagcagcagacggtcgatgatgatgggagtccgcttgtcgcctggaggaagatgcttggcgagtcgtccgaacaacacaatgactccctctttgacgaaatctgcctcgacgttggcgttagcgggctgagccaaatatgcttcgaagcgggcaatcagctcgctaacgaccttgtcaccgtgtgcatctacaacagcaacgccggccgccagcaaggcttggcggacttcggacgcacggtcaccgagagcctcctcgatgaccaagaaatcaaacagtgcgagaacatgcgctttacccatgagagggctcaaggcctgcagggatcgagcgatcgccaccctgatgtgagatgggtcttgcctatccagagattccggaataaccatgccgaatttgtcaaattcgggggccaagactcgagctttttcgacatagagcgatcggagcgcctcgaggacatgcttgacgttctcggggaattgagctgttgcttctgcgatggcttgggcagcgccatttctgaccacagcgacatcgtgttgtaggaaaggcaacagtttctccacgtaatcgctcgtaacatcgagcccgttttcttcccatagcgagtcggccagaacaacattcggttcgtcattatcgaaccgtccgatgaaaatttcgaccgggaacgtcaattccgtcaggtcgagaggttgcaaagcttgtagagctccgtttcgaacgtagctctctcgtgagaggataccgtcaaccagtgcttgtacctctcccggcgtggcagtgtcggcaatagtttcccctaaccgagccaaagccgccataccagctttggcttgtaccggttgcctctctgacaaagagatgagatcccgtgctaccgaaagtcgtgggtagctcagcgagttcatagtagcgacgatgttggccagaatttccacgacaagggtcagctgttcgggagcactttcacgcttggcctcgccctcgcccagtccactgttttcgattaccagagacagaagggggagaatgtacacgagcgtcaccgcgtccatcttgccatgttgactactggtgtgtaagctatgcaagaccctcagacattgatctgttaccgggagtgccgaaacgtgagaggtgtactattgacactgccttaaacgacttgacttacccgtgatgctctcaaccaagtaattcccagccagaccttttccagcttgagcccttagcagggtcacacccgcgaaccttgcagtattggaatcgatgtcctggcagactcggctcatgtcctgttcaagtcaagctgtgtcaattgatgcaagtgctcagtctttgccgaaggatcgctcaccaggtacaagccgcaagcctcgtctccaaccaggaacgctgccggcccgacagctgaagcgattaccaccccaaggacctgttcgaggtggttgtcgaatacatccgtccgcccgttgagcaacgcgcggaacacttcgagcccctgcaagaattcgcgttgcacttcggcgacccgcgcgcggacagaagcttcctttgccgtctgtgcattgacaagagcttgatcttgcttagacaaggctccaccggtcgatcctgccttcttcttggcgatcgagtcccgaacttcctgatcccacttgtcctgggcgtacgtcttactgttcttattcaagacagcttctttcttctgactcaaaactgaaatgatcggttatgtaagcgcaaaaagtctcaacggagagaatatattgatgacgcaccatcttcgtaaagttcgccctcggcggtggaccacacaccgatctcaaattcgccgataaaagccaatttgagtggatccatggtggtagtgacttgccgcacgacattgggaacgtagtggtgaggcgcaacaaaaacgacggttgttaacgcttgcaaagcggcctgcttgcgagcccggttctgatcaatcgaagatgaattagcttgtaaggtccttgctgctcgaaagagtcgcgcactcacgacgtctttgctattgagagtcttggtaatcatcgacatgatttggtccatctcgttttgggctaggatggcagggtcacaaccagcagtaacagcattgtcgagccaaatctgggttgcaccagccccgaagtaagggtggtgaaacagcaacagacaagccaaaagcaggacgtcgccagcctgacgaccggcagcctcgtctgaggccgactccgtcctggttttaataagcttgccaatcatttgcgttgttgcccggatctgaagtgaccgtgacgtatgtccttcgttgtcgacaatctttcgctcgtcggacgactgctgatcgagccacgagttgatagactccaagaggttatctccgaatgatttgggatgacgttcaatcgccttttgaatagcagaaagtgcagactgtctggtagcgtgctccggaccctcaagggcggtcacgatgagaggagccgtgacagcaagactatgttcacgcgagcggttgaatcagtctctatataatcccccgaacgcgtgcgggttgaaacgaaccgaatcgcgatgtcgactttctgttctgcgtttcggtcgactgccacctcgaaggctctgagcatccaagtctatgcgaagaagcgatttgaaccgagtgagtcagcgaaaactcggatgttgcggcctcgatcaaagggctcgctcaccttgacacgcgtaatcagttttgggtccgaatcatccgtcaataccttgcgccagatcttgtcgttcagcaaaaacgacggtttcggcttgacttgcatcaaggccgaaatcgtcgtctgcaagctggccacctttgcgttggccgacaagtgtcgagctagcgggcctccaacgagagcaacagccatgtacggctctaacagtgcgctcgaggcactggttggtagcaatgtcgacgctgacttgaaggcagtctccaaaccgggaatgatggcctctgccatcttggttcctgcggcagaccaagttgcggaagcatcgctcgcccacagagcgtcggcgatggtcaggagaacctgacgtcgcaagacagtcttcattgacgtcacgtcttttttcaagctggtcaaacatttgtcatccggttgaccgacatcctccgcagtgcagtaggtcaagtggcaggtcagagcagcgcaaagggcttccgcggcggcctcattggtctccttggacaataacggaatcaatccggatgttgcgactcccgaagtcgatgcgatggctggtatcgaggctgcgatttcaaagagggctattcggttctccgggcccgtagtcttgccgctgatgggcagcgccaaagtctcagtcatcatcttgccctgcgcttgagctcccagtcgtttggcgagcgaaattccgaaagcgaccgcagcagatctgttctccggcttggcagatttcgtagccgaaatcattccgggaaccagcttttgcggtatctctgcggacaggtcgatactcgacacgtcacaaatgtgcgtgatcactgcgagtctcgtttgtgtcagcgctgaataagagcgagatttgcagcctgtagtaacacacctggcaatcccgtttccgggctcctgatgagtaacttgtccacagcagggacgatcgtctcgaggaagaccttcgaatctgccaataccgtccacaaatcgtcaaacgcagcctgccggaccagcacgaattaggacgccgacacgacttcggttcacaatcagggtgatactcacatatgttcggcggggcaagggcgacttggcgttcaagatcctctctacgaacagcttggtcatctgttccttttgcgtccgagcgtatttatctttgagcaattcctggtccgcatccttttgcttgggcgtgatcttgagtctgatagcgacgcccatagcaactccgagcatcgggatcagtcgatccccgaccttgggaatcgcttggtagaggacttcgaaagtttcagagatcaggcggtaattctgcatcaggattcgcatgatcttgagtcagtatcaacattccttgacgtctcataatttccggtactcacgcttcgaagcacacgtcgggtcctgatgacagcgcccttctgcatagcatccttcatccttgccttgccctctcgtggtgtcaagattccgtcgagagcgtacgccatcgagattacgagcggcttgaagagcggctctgaagcgaaatccggtcgacttctcgccagggtgtcataggagacgtgggcgagagtcatgaaggggtataggttgtgagtggcgaccctatgaaacagaagatgcaaggatcagcttctcgaaacaatttgcggctttgtgggtcgcaaagcgacttacgttcggctgggcgagctagctcgctcgagctcatcatgtgccgtcttgatgatgaatctccaaagcctgtctttgctctcggcattctcactctccgcttccttctgagcaagtttgacgagcacacggatgattgctacgtgcgacttgtcgtctgatagacggaagaggccgtccaccagaagactgaccaagtcgagagcctcgggagacctggcgactaagacaggaaaggtcgagcttgagtaatagttaaaaaaggcgactggaggtaactgctactgacattctgtcgtcacgcccagctccttgttcaaaaagttgatcctctcgccagtcttgcttttaaagactttcctgtcgatgacttcgagatccatctcctgacctgcatcatcgccgccatcctcggagccgccagactcggcgtcgtcaccgtcctcgtcctcgctcccggtgacttcgcccgagttgttcatccattcctcgacctttgattttgagcgcatgccgggccgcgcttgcagtcgcttaaaagcggttttggaggacacgattgcagatattcttcctgggtattactgttccgctagaccaagtacaaatatacagttgcagacgatgttgttcccgtggcgtaagtgtcccgggtcgtctagagatctctatgtgtctatctgcgatctgtgattgggttatgctagaatctgcttgcgaaatcgggagatgtggtcagatcgatcgaacttctcgtttactcaaaaggtcgagtcgaggtcccccatgcatatcacgcttagggcgggttcattggggggttgacctgtcagaagcgcgtcgttgccatagcgcatccggggcacccaagttcaaggtgaacgatcatacgggtcaatcacgtcgagatggtataatcagttcaatcccaacgaacagatgccttgatcagactatggccggtctgtgccccgaagttcactccgattcaagatgtctatccacgcgagggcggacgcatgtcggataccaatagacaacggctcgatcgagctcgagggatcgatcttgcggcctagcggagatgaccgtgaatatccacttctatcgcacatgtatctgcctatcggtaccgactgaagggtcaacgtatctggtctcgcaagaacagctcgtcgcagcaactacgctgtcgtcgctcatccctggcccgctctgggaggctcgatggacgatcggtgggcaatcagttcacaaccctgaggacgtccagagacgatgtttacgtaccggtttgatcgcaattgctccagtgtcgtgaactccatagccaccgtctttgcatcaacaggtacggctgttttactgtacaatactcgggggactggtacgtctacagggaaagcgtcctggaatggagaggcggaacgtcgagatttcggtgccgtcgtcgaatggtttctcgagcaagaatggactagaatggcgatgaaagcagattcgaccacgttgttctgttgtgtaagccagaatttatgcgagcatcatctgctttgtagccggctcaccgtctcaccatcgggaacgatgcctctttgacctagggctactcatttggagcgctagctgcctccgcttacagcccatcaacgaaccttctcgacaagctcaacaagatccacccggattcgagtctagcggtcagacacgtcctcgtctcgccccctgttggattcaccgccagctttatcatccccttcaagtacagctcgtacacacacgcgaccaagacgatcctcgaagccgatcaggctggggccgtgccgggaaaggtcttgctcgtctacggggacagtgaccaattctcgtccgtctcggactatcagaagtatatcagcaaaatcgctaccaaacagaaagaccctcgtctagaggtcgccgtgatcaaaggcgcgaaccacttctacccctcgctagccatgctgagcgatctgcgccggatcattgacgaatggagggacctctcgatacagcccgtatcactccgccgaacaacctgatcgccaatgtgaaggcagcgggtagctcaagtctccctttcagggcttgccatatgaggataactatgagatcacatctccgttcttggacaatcgcttgaaatgcgttcatttacatgcccggtcgcagctctttgtggtcgttctgtcaagtggtaggctcgagccttgatctacgatttccactgaccggtatcacgaccatcccgtaccatatcaatctaatatatatgctataacgtgtaatccgactgagaacgtgaatacatgccgcgtgaattcgtaataatgaaaaagggtgaaaaacagaagacgtaaagagtgcctataatgcgcgtccatgccactgcgccccgccctagagggtctgggcgacctcgaccttgtcgatgatcatcgactttgtaatcttcttgcccttgaacgcctccaacccttcgcccgcataactgaccgcgggatcaatctcgacctcacaaccctcctcgacttcggcaccggcctgcttcaaccactcgacatgttgcgccaagatatccctcctgctcgtctctggacaatcggtgcccgagcccggagcgttcttgagcgggctgaattcttccgacctgggcgcttcgaggactgccaggcgggaggtaaagggaaagacgtcaaagacgaacagttcgagtttcatcccgttcggctgagtcggcttgaccgcctcgcccgacgtggtatcgacgtgcgcgatctttttcctggcgatatggaacgtcatctccttttccagggattccatcttttgcaaaaactcgagcgtaaagtagtggttggcgatgttggcggcccggaaggcgagctcctctgggttttccgggtccttcatctcggcttccttttcgcccatctccgagtactcgacgacgccgtatttgccattcctcagggccaacacgccgacgctctccttggcatgacgtttcttgacgaccttggcccccgtctcggcgcgcttttcgatcgaatagccgagaaagaccggatccgccacgcggacgagacagttgtcgacgcagtaggcgtggacgtgttcgatcccacgggattgcatgtgttgcaagacgctcatgttatcacgcaggttggcgaggggttgacgcaaggcagcgtacagacccccgttgccatcgggagcgacggcgatggtggaacggtcttgcaagaagatcttgccgtcgtttgtcaacgcagggaggacacctggaagaccctcgccgggatacatcagctgggtttctaccgccgacctatcaaggcgggcatcgactcaccctggtcaaagaagacgacattcctctcgtccaacccgaaaaactcgttttccctgaaatacttctccgtctcccttctcgtcggcccactggtcatgacataccacaccagtccgccgctctgtttcccaccggcctgtgcatcctgtccctgtcgagcgatctcgtcgagcttcttgatcctctcgccttgcatcctgaacaacgtctttccgctgggcagaccgatatcgtaacaccccttcggagcggccgaaccgagccttgtcccctgtccaccggccatcaagatgatcccgactttaccctcccggatggcttgcatgcccgtctccttccacttgggtaccgaggtcgaacgtaacgctgggtccgtcgtcgaggccatgtcggatgaagggagggggtcgagcgtctctggttcagacccaccttcggcagcgtccttgtcagcagagacggccgtctggaagatccggttgacacgggggatatcgatcgatttgatctggtgcaagagggattcctgctcgggagcggagagttttgggtagaacgccaagaggtgggcttggccgtgttccttcaggtgagcgagggtggattcgtacgacatggcgagagatgagacgtgcgtgccggtcgatgcaatgtgagggagtcttgtagagattgaatgtctatgggatgcgtcgttaacgatattggcaacagaatcgttgttcatcatcatcatcatcattttgggggggaaaaacaatgccacacggatcagctgctgtgcggctaccgctgtgggcgaaatgtaaacatgcgccagaaagtcgatgccgctcgctcacctttgtgtgtaaaatgctcgagagacgatgattgtccgagatgatccgtgacgacgtaacgtggagaggcgatgtgaacaggcttatatgctagattcctaggtgtgagaggcgagtgccaagaagatgtttgatcaaaggaggtcaatctgcaacttgaatcatcgcattccatcaaaatcccatcattccgttgtcattcccatgccggccatgccatcaagatcacatcaacacaacgcggggaggcgaatcaaatcacgtgatttacacgatcgatgacggcatatcaagctcctgccccttcccgaccatgctgccatcaatcgacagaagaaggtcgatcaaccattccgcgcactcagcatcatcatcgccatcatcacagtctacgccggttacataggtacatagatacatagacctcctggctcaaccatctggaaagctcagtttcctgaaaactaatcgccaacgtcatcgacctactcgcgcacttaccatgtcaaacacatccaacctgactctaccggcgttgtacggacgagcactccgctcgctcctccccattttcaacgacgaggtctcgacctcgctcgcctcgacccaacagaccctccaggacggcctgaccgacctcgatctcgtcatccgaatgtccagcacgcttggggtattcagtgataacgagtccatggatgatgtaggagatggggaattgccgttgatggccgtcgaatggatcaaggcagaggttctcggtcgggtgaacggggatggaatcaaggatcgcctgaagacgctcaactcgagtcgagtgagtgtaggatcgcgacctcctctgaattcacctcgaaaggtttactaatacagaaatgtctttcccgtcctctcgcctagtcttcgtacgaatccttcctcttcctcttggaatcctattctttccccaccccacccggatttacctacccgtccgacccatcctcatcctcctccccatcccggccatcctcctcatccacacccgcctcgtcctcgttcacgccttccgatccggcttcgaggcgggacgccaagatcaaacagtatcgtatggaaaaggagtggaaggaaaaagtctctcacgccttgcccggggtggacgttggctcgtcacccttgcccgggatcctcgctttactggaaaagacgcaaggagtaggagagacgcaggatagcgccgatggactggctaatgaagcgtccaagttgaacatttccggcacgggcgggtcggcgggggtgaacgggacttcatcttcttcctccttcgcaaacatgcgggagacgggcatctctcttttcaccctcctcctcgtccagacgtccgcccaactttcctccatcgcatcagagacgtccctcttggaatccgcgagtatgtcggcccagatcatcgaagaagaccaagagcgaaagacgcgggaaagggaacaagctcgaaagaagcaagagggcgagagggtagggttgcgagaggaggagaggtggaggttggacatgaacctcgtcaggcggaaagagaggggcaacgtggcgaccctcatcgacgatcgaggcaaggtgagcccgcatctcgctctcaccgtttccgcgcctcgtcggatcatgaccggtcaaccgctcatactcgtccccaaccccttttctctttatacatccccagcccacgcaaccgttcaccatcctcccctcggcgggtctgcaagacttgtccgaccgagcgaggttgggtgccgaggtgtaccgatcgccccatcgattacctaccatgacaatcgacgagtatctcgaagaagagcgaagacgagggaacatcttgacaggtggcgggtgagcgcgacagagggtcctctcatgacggtatgaccgagaatgctaaccctggccttgccttccgacacctcgtcgctgccagcgccgcttcggagaacgcgcccacttccaccgaggtcctccagctagcttccgagcaagacgggacgtacgatggggaggaaaaagaagagcaaaagcgccggaaagaagaggattgggcggtctacaccgagatcaacaagaagggggctgggaataccatgaataggggctgaacgatattcatccactacatgcacaaaagcttgcttcgtgcgatacgactagtcgagaccgcaagagactcgcattcaggagaacagacttgattgcgcgagttgcgatcgatgtacataacttgaaggacaagtaggaaaggcgcacagcgttcataaagagacaagtcgtaataggccacgatgttcgccactctacgcagacggacggagacagacaccttcgttaatactcgacttcatcgccttccctacctccgcgaccggcatcgtcagcgcccacctccatatcggtctcttctgtaaccggtttggtgtcttccgctgcgacattgtcagtcgccgtcttgccttcgccagacatctcctccccctcgcccttgatcgtgatactgggtgcttcaccctgatctacgtccatgctcttggccagattctcaatcttcttgtcttggtcttgttgacggaaaccgtcgagcttttcttgcgcattcttacgcttctcggtcaaactggcgagcttttcctcggtctccgtgcgcagtcttctcagagcgatctcatcctgctcaatgatgtcgcgggccttcttttcttgctcgtcaagaatgtcctcttgctccggaagcagtcttcgcggtcgctacggtgccgaggtcgaacggttagtgagccgtgttaatgaggagaaccgctcgctgcttcggactcacgtagtacaggggttttgggttggcagccatccctgcgtcacgggccggcccgagtgctgtaatcaatgcgccttgtccattggctttgtcgatccagctggaactggttaacaagaagcccgacacataaggcagatgtcgcgccttgacttttgcctgaacaaatcaaatcattaacgtcagctatcgttccatagcagatggctttagatcaacgcacaacagacttacctccatctccgcctccctcaacgtgttttggaccctctcgaactctatccgagccgactttgcctccctttcgcgctcgttgatctcgtgcacccgctgcgactcgccttgcagcttgttagctactcttgccgcgacctcttgtcttgcctttgcctgcagagcatgacgaatgatttgggattgttaattgagcccatcaatcaggcaagcgagcacaagacttgccctgtcgctggcagccttcgacttctcctctttggtgaaccgattgagggtaccaagcaggttaccaaacagccgctgaccacgcttcttttcttcactacccatagtcctctgtcttctgcaatcatggtacacgatcccaagtaagcatccagctagctggggcaagaggtcggtcgctgttactgactttgtcgcaggttcgctgcctttaggttcatcccttcccgagttctcagtgtccttactgagaacctcacgatcacctgggccagaattcataccaggcgttgagctgttggtgatactcatttgccgatccgggtggacgaaagggctgctgcctcccgacccggaaggccccgcatcctggatgtcgtccgaaaccatattctcggtcatgttccgatgattcgagattattcggcttttttctattgtccgaaccgaggtctatccgctctaggtgattattacgacagcgatctatggacgattttgagtgcaaattgctgttctcttgcaaatgacgatgcatgccaggagctttgagctggttgaaccttcagtcgctcgagtttcggtacaagcttgaccgaggtcataggcctcagacctcgcgcggaccgaaatcgagagggacatcagacgcctctcaggtcatctcgtatcgagcctattacatcaactctaatggattacaagtatctcatcttacgacagcgcatcacgagtgcctgctacggagcgatattgttcgtttcgcttggtttggacattttgtggtctccaatcctcttaagtatgtcgagtgcaccttctccaacgctaaaactctttcggctcgtcccgggcgatgtgcctgtcgatgcgacctctgcgttggttctgaaccctgccattctagcatatttgcctgcattcggtattccgggagagccgggactcatttctctcatttctcgatcttctacggatgatccgcgccgcacaatctgtcctggtcgaggtatatccaggttggcggctctcaagccgggtaaatcggctgtggcgatttttgggctgatgtcttcggattgtcctggtggtcgagacagacggtccgccaggccgtctcgtgtcacgcctacgacgctaccgcccttgccgcttcctcctactccaagctgtatgcctttactgaatttgttcgaggaagcagaagagcatacactagacggcctcttacctgacttcgccgcaccggcaacgtctggatgaatgatactagcggtgtgtgatggtcgtctgggatataaggcttcttcctgtgaagaccgattccgttgtggaacgggtcggcctgatgcatccaatagagcaggaaagtagctggttcgctcgtttggtgatagaatctggttcagtggcgtggtgagtggcctggtaccgctggtggtcgataatcttgtcagtgttcccggcccgatctggcttccggtcgaaccagatctccttggtttggctgggagaggaatgtagacttccgcttgaagttcgtggtatttgataccgtcagccaatccatacggattgatcgatgaaacgccttcctttgctttggcacctccaactaccccctcttcaacggcgatgatgcggccgacgatccactcgcgctcacgcatcgactgctcaatgtcgggagtgggtttaagaaaatagtggggactggctatattgaaagcggcccagcttttcgcagtggcattccgcgtaggcaggaataacgctaaatcgctcttggagaaattggcaaacgcgatttgattctttgaccgttcccggtattgtttgcaggacttttgccactttttgacgagacccattgtgcgagtaacagaatcagaaaaggcactgagatcatacgccttcatcgcttggagctcgatttgcagataatcggcgctcgtgatggacgaactcgtagattgcttggggttgagcgatttttcgcgatcctgactgactggcaaaaggccagacgtcgatcctgatatggtcgcgctcgattggatggcagagtgtagccgagatatgcagtcgtagaatgtgctggcgacttttatagtttccttgctgaattcttcttgcttttccttttccgccactgctagaccagcacggtctttctcttgaatgactgtatcgttggcctgcgatacctttcgttgcgcgtctctgagttcggctttgatcatgcccatctccgcctttagaccattgacctccctgacatgtttcgcgctcgcggctgcaaggtcgtttgaagctttggactttgtttgcgatatatcagcggtaagctcaacaatctgctgctccagtactgcacgatcgccgtcggcttccgccatcctttctcggaggttcgcctccgcgatcagtgcttgacgctggagagcttcgccgcgttcagctctgatctcgtccaccgtatgcgcggtcgactcaagctcagcttgcaagtccagaacttttctagcgagggcttcctcgtctttccgggcgtcagacaagcctcgcaaaatttgcgaccgctccacctccagttggtgcatctgggcgagatgagcttcacgctctgtctctagctgcgaagccaactctttcgctctggaccgcgcttccgccgaaagcgccacctcggcctcgagtcggcgcgtgatctcgagagattgttcatcagatcgtgtcggcgtcccgctcatcgaagctgttgtgggtttgcctaaggtccgattttcgtcttccagaactcgcaatcgctcgagtgcttgcgtaacttcggggacctccgtaatctcattgactgggcgactcgtggctgaaggtggatgtccacgtagagcagcagtcagtgcgcttaggctcctttgccgaacgagctgattctcattgggcttcggttcttgactataatctatgtggcgacggatgggcagttaacgatccaccatcacaggcgtgctggccaaactcactgttgaggtcccaaacctcgcgaatttgggtaaggctggcggtcattgagtcgatttgagatctcaacttcgtcaagctgtcagcgagcgggttatcgatcgcacccgattggccaattaaggcatcatcctgcaatagctggccgaggaaaagcaggtattctatacaaagcacatcgcgaattgtatcgcattatcaataccgaacggaaccaacccaaagtcgttcctgcttacccatcagtgtggacaccgaaaagtcgcagtcgtccagttccagatcgcccgaatcaacagatagatcgacactcggtccgggatctcctccttcaccttttgtttgaagcgcctcgatttcgtagggaagtaagcccaatatatcgtctttgaatttgcgccttcgttcgcgttcgatctccaggcgtgttccaagtgcgtcaatgagtccactggcaccgccgtgaagcagggcgcctaattctttgcgccagactatctcgatacaagccatcccataagcataagccatgttgcgaagacgatccagatggggaaatccggttttggcgagagttctggtcgataacagagagtcttctatcactcccatttgaggagataattcggcgatgacgctttgctgtccagagatcgcgtgcaggtggatatggaggcttaaggtgaatgagttctatgatgaagagacatgagcagcggcaccacagacagcccacagtcccatgtcgctgtaccttgagctcaaccattgctataatctgctcccttgcattgtggtcgagatacacaagaccttgaggggtcaaaagcttagcttgggggttcactcgggaaatgctctgtggtactcactttcccagctgttgccaacatcgtcttctagcaagtcccgagtttgcagcgtcaaaatttcagcattctgtataatctcctcagaagcggcaatagcatcatgtttcagtgacggaatggacgcaaggatctcctcagcggaatgctgcatcccgtcgaaagcctcgatgagctgggatgatttgcgatggtggtcctctatataaaggtctcgtcagggttcactacacgataccggatcaaatgctgtggccataccgtatatttgacgacaactctctctgactgtgcgcatcttagcttcgctgacccaatcgccgagaaacttcttcttgagctgcccgtccttgctcgactcgttcttgctggttggcccactgacaactctgccgacctccatgcttgaacgccgaccgtccttcttagtcttcatcttgctcaagaagaatggttcgacttcgattttggagatgagcaaaaggtcctgctccattccccatgttgtaacatgtcccgtgctcttgtcttcgtcagccttccagataagattgcgttctcgcctgagctctcgttcgaccatgaccttgaactcggtcagggtcggtgaacgagatcctgaatttgacggtcctttctcgtgtctagcagcaaggccagcgctccgttggctgtccgcgacatttccaccggattcatgactgtcaatcgccccacggtcgcgttgtgaaccgtgtatcagacgttcaaggtggtcccccagactgtttcccgccaggtccaggcctcgaatctgagcgtgaagacgatccgacacatcgtgtagatgatgaaggtagatttcgaaatgttcagcgatatcatccgcagtatggaacccagggtgacctgtgcgggaaggacgaatcagctttgaacgtctcgcaaccaatagatagcgagcccactcggtagaggttccgggagaaccagatcttcctctatgcctttcacgaactcgtagggttcggccatgaaactctccctgtcaaaagcgtagagagcaactcctagacctcctttatcctctgcttctggtagacgaatttcgttaccgttcagatcatactgcgtttggccagattgacgatgagctaaagatcggggacccggtaccgtgtatccttgcgggggtgcaggagggtggtggacagattcggtagctgccaaattgctaagatctttgtagagagactcggatagctgcgatccagatgagtggaacaaaatcaagttctctagcgggatgtcgatcaatcgagatatagccccccgcagtgcctcaagactggaatttgaccgaccgaaggaagatcagttcgatttcctgggatcgattttgaggagatcgatcttgaggaagacagggatacttacgacgggaagtcatgtaaagtgacatccagctgctcgaaagccccgtccgagactcgaaagacatccatccttcaagttcagcgaaatcgctgttgtggcaatatgcagggcgcctgctatcttataccgtcacgcttcattttgggagagtatctagggcctacggaaaccaaacagtcgaagacgtttgtgtatctgtgacctttgatggctgtcagctaatgcagctaacgacgacaggatgtcgccatcagggtacgatggtcaagcgacctggccgctcacctccgaaaggggatcgggagcaaatgcggaagcagatcaggcgttcaccagctttaatcctccagcatcatgaattgatcagaggattagaagcttaacacatgctacatgctacatgtatgcacctggagtggctaccgaaatgtcgatgcatcataccatagaaatgaaagtcggatatatatactctcaaatccttacccatttagcagacgagacaactccgcctacgggcaggtcatcccgggtacatgccctcattcaagctctaggtctcatccatcgggattcttcgggcagacgtatgaacagcagcgaccgcaacgcatacctcttattctccgagaaggctcaaagagaggatctcagccgtattcatagctcagcgttcgtaggtggatcgccactcgctctccaacaaaagagagctgacacgaaaagttcgtttagctagaggccgctctgcactctaatcatgatgaatcgattgacgacggatccgaaagctcgggctccgctagctccagagagaataacgacagtgatgccaatagctcgaaagccagcggtcaatccaggagaccgaagaaacggcagaggagactgagtgacgacagatatggattgttggcaagtatgcgcgattcgtacgctccggcctgtctgtgtgaactgaccggtctcccgcgcgctccaggccggactcccctctcctggctatattctcgaagtagcaggctccagtctgacagcagctcgacatctctgcgtacctgatcccgtcgggcagggcgctcctagcacttctgacaatgaggatcgctcgagagacaatttcgctttcgatatcatcattaattgggaaggaggaagacatcacgcgatgagagacaaggcagcaggcttctgctatgtccaggatataggactggcgatcgacctcttgcggagaaaaggctgtattagacacccgggacccatcaacgaaggaagtgcagatgccgcacgagaaacgttttactaccagccacagaatctcaagcggagacccaggatcatgtacgtcgacatggacatacactttggagatggagttgcatccgcctgtcgacacccttatcgatactccttccccgcaactacgtcgcaattgaaaagcccgaaaccttctgtcttgaccttgtctcttcatcaccatgcaagaggattcttccccgctactgtcgaagggaacttgacaccggctgataccccgacgccattcaacctatcgattccactgaattcaggggtctcatcagcgacttatgcgagactaatggggacttgtgtcgaaccgctcaaagatgcattcgatccggactacgttgtgcttctattggggatggatgcgctgtacggggacgtattggtcgacggagccgggaactggtcgctgggcgggataggaggcgttgcttggacctgcgagaagatccgagggtggaaccgaaggaccttggttctaggaggaggaggctataatcgtctaaacaccgcaaaaggttgggcttgcgctaccggtgtctttgtgagtgtggcattcgcgatagcctagtctttgacctttaaaagtccactgttttgcagctgggcaacgaatttgacgctcaaagaacagtgcccgagcacggcttctggcctgaatatggccctgacttttctctggatgtcacacctggcagcatcaaagaccgaaacgaccaggcacatcttcaagaaatcgaagcagccagcgatgtatggactaagagaatcgcggcaatcatgcagtagtcagacgacggggagccagcgaaagactacttatcactcgtattcaaaagccctatgatgtacgggtgctacccggtttaagatgtcaagtctcggccacggcggtagcccggaatctgcgagtcagaccctttttcatagctttgctgaacttaagatatgccgaagagaggctgctcgctgccggcgtctcccagtcgctaaactgagcatgaatatactgactgactgtcttgcttcaaattcactatgatcgcaaacaccacttgtgcagcctgactcctgcggcatatagcacctattttgatgacagtaggtagtagtgtatttcatcaaacccaagagcgtgaattgcatccatctcctcggccgcatgtgaatgattcgatcgattttatttccaccgtagtgtctatatgacgaaagaccctatgcaagcgtgaacaaacgcaaccctgtaaccctgtagatccgtagctcgacaagcaagttcgaaagttgtgttgcattcacacattgtaaagctgggatcgaagattggagcaacctcgctgggatcctcaatcggacgagacgctcgaatacaactccgaagctgagcattgcccaacatggtcgaccagggctccagcagcgaccccggagaggtgaagaagtataagacgatatacaacaagaatccaggcaccctcgtgatcggtcaaacgagtctgaactgggtgcccgatatctccggtgcggaaaaggtaccgacgcagcagctgaaccggatcataagtacgttatgctgctgtaaggcaatcagatccgagctgatctatcattccgaacgatatggctcaaggcatgttcacgtcgaaagctggcgcagctaaaacctcggcgaagctggccttcattgatgatcgacccaagggaggtctgaccttccagttcacagccactcctcctcaaagcttggccgatcgtcaagctttgcaagactacctaatccccttcatcgccgaaaacaagcaacgcaacacgaccaacctcgcgactgaagccaatgctggtcaaggaatcggtgcaggggcagcagcattagcaagacctcagcctacggcctcttcatcgaactctacatcgacgagtcgagccaatacgccgggacccgtagcccgtaccactgctggtgggcctggaggcattagctatgacgaagaagaaatcggattgcggaaacgcgtgcttgccaaaaccccgacactgaagtcattgcatcgggacttggtcatagcgggattggtcagcgatgaagacttttgggacggacgacaagtcagtcagtcacgcactgggatgtaattggcctaactaatcggctcgatttcatagcatctcattgagcaagagcgcctaatgatgtcgcagcgacctggtattccatctcaactcttggacgatcgattcggtttcaatgcacagaacaagaatgatggcaagaacaagagcgtgggaaccggttttggaatcgctcaggcgaccaaacggaaacctgatcagaggaacggcgacgatgaaatcaaaatcaatatcaccagagaattgcaagaatcggtctttagggaatttcccatcgtgcaagacatctatgtcaatcatgttggaacgaaagaagggcagatcacggagcaggatttttggtcgagatattttcggtcgaagctttgggaccggcatcgagcgtcggctcgagcaggaggcagtacgaatatacgtgctgataccatctttgatatgtatcttgaggctcctgatgatggtaagtcagatcaacgagatcaggacgaaatttcccctgaacctacccacttcatccagctgctgaacccagagaggcgccgaagaggagcgtggacatgtttctagatctggcagctacagaggaagaccatcagcaggcgagtcagagctcgatgatcgatgttcacggcggtttcgctgacaatggtcgcaatacagacgggtaatgggaaagattatacaatgcaggccggcaagcagaaagcgacgctacctctgatccgccgattcaacgaccactcaaatcgacttgttgccttggagtgagtcttgccgagagaatgcttgtaccttttctgaccccgcatcactttgtagtgaagaagatgcagcttcggatgcactaggcgatggcgtagcgtccgccgaggtacgacgctgcagggagagtccatagcagcaattcggtcttgagctaactttgtctcatacaaggcccggctttactccgagatcgagttggatgaattgcgaagccacgagcagacctcaacgatcagcctggacgtacaagaccagcaagatatgttcgacggtaagacctctgatcgtgaggatgcaggtgctgcttggctacaagggaaatcaacgagcgtaagtcatgacaagcgcccgatttatgctgacaagctccgccatctgacgatcttgatctcatcaggatatccgcaatatcataatgacgtcccaaacgacgcttcgtgactggcgaccggacctcccgaaagtgataccggcacttccccctggcgagactcgaaagaaggaatcctggataacgcgcgagggagctacgcaggaggaattcgctaatgtgagaaaggcggcagaaagagcagtatcgaccgttgcgaaaggtgtagaagaagctaggcaggcgatggaggagcaaggtaagttccagtgccccaggaaaccacgtcgcacatattgagctccatttcaacgtcagaccctattcctcaagccatcatgtctcaaattctaacctgtcacaatgcccatacggaatttctgcgtcaattttggtcagcagttctgcccacgccgccgggaacgctgggtgctcctactccagagcagaagatggccaaggcacggaagatggcgaaatttctcagtttgatgaaagaaaaggttgacagcgtcatcttgagcgcgaaacaggatacaacagtcgatacggagcgagttcaagaggtgcgcgcgtgatggtatgacctcgcggagtgttcatggcttacaccttgttctcaaaggctcttgctcctacccttcaagcagcacaaaaggcgcttgcccaattctcaaccatgactcggacaaaaatataatgattatggctgatgaagatagtagatcttatccttgtaccccagtcacgtgaccagatagcttccggactcacgttaacatccggtcggtcctagcatcatcctatctcagattccggtaacctgtaacgataccctcgtgaacctccagcttctgtgattggtttacccttactcaaactccacgtaaatcaccgaagattgcaagatcaaagttctgcagcattccgctggctccatctgactaaacatgacgcaagatatggtactgccgtctttggaaacgccaactcgcttcgccttcccgtttccaaagccatatgatattcaattacaactcatgcaaacggtgtttagcgctatcgagagctcccagatcgccatagtgagttcttaatacgaaagagagccaaaccctcaagtcaataatagcattgtccaggtggaatccccaactgggacaggaaagtcgctcagtcttctcacagcgactctgagctggcttgaggacaacgagaaacggcttgaagtctatactagggatgctttagccgcaaagttggctgcagagagtgatgggggtatgttcgccatgtgaacgttcgaatcagctatcccgcaagtctaatttttgacaattggtgatatagatccgccatgggtcatccaacacacactcgacaggcaaatggccgaatatcaggctgttcaggatcgcctcaaggagagaatggcggcagcaaaggctcgagaacgtcaacttctcaaggactctcggcgctcccaaacccgggtctccaagaagccacgactggatcaacctgagagttccggaacggttgtcccgatgatcgatgacgaatttctgccggtagatcaagcagatcacagtgggacttctcagatcgcggcaacagacggggtatcccccgaggtcagggcactcatggaccagtaggttgcgatgctcggacactacaatttttgctacgtagatccccctaaacgatctgcatgattcaggttggacgctggtaccaaaccaaaacaggacgaggaagaggaaatagacgttcctaaagtcttctatacatcaagaacgcatacgcagttgcgtcagttgacagcagaattgctcaagacaaagttcgccagacggacagcgttagagggctcgataacgaagaggcaatcagacgagcaggaggctctgcccatcaggtctgtcccccttggaggtcgagctcaactatgtatcaacgcaaaagttagtcttagcgggactcttctgctacgttcgtccactaatcgtcgacagagtactgttgaaggtgagagagataggtcgaaccagaggtggcgaccgcatgaacgaagcttgcctggatcttcagaaggctggtgagttcgctatagagacgcggctgtatgtgaaaagcttatacttctgccgtctgaacaaagatagcaaggcaggacgttgcgcttacttgccaccgaaagagaaagaggacaaaatgctggacttccgagatcagatcctggtacgatcgaacggctccgtccgtttgtgcctaccgctcacctcccagctcaggctgatccgaaagatatcgaagatatcgtggacctaggcaaagttcagagcgtgtgtccatactatgccacccgacggagcgtcaagcaagctcaagtaagtttaacaggagtcgttcggcttttcttcccttgttctcatcgccgtgccaacagctcgttaccctcccgtataatttgttgctccaacaaagcgcacgggaggctctaggtatcagcctcaaggaccatgttgtggtcatcgacgaagcacacagtaaggcatgagcctcgtcggatacggtcgagcggcgctgacagagatcggcagatctgattgataccattctgagtatacactcagtcgcccttcctgtggaccacttgcgaacagcagcaactcagatcgaaacgtatcagcgccgatttacaaaccgtctgaagccagtacacgcggtgcatctcaaacaatgctcggctgttatcgaagcgcttgtctcgatatgcgaacaatggtctactacgaaagcagaatctaccggtcgcacacacaaggctcaggaacagctattccgcatcaacgagatcacgtcgcaaatgaagggaggcgcagatcaagtcaatctgattgaattggtccagtacctcaaagatagccacatcgcgcagaaagtgtccggttacgccgaaaaggctgcacaaagcggcaattcagacggtaggataagatcgtgtaggctgacacgactgaagctgatgcgtcggcgctgtctaggcatcacgcgcaaagctcttgcacatcaaaacatctccgccttccggcaggtcgagactttcttgctgtcgttgaccgaagccaacgaggatggccgaattctgatctcgacagagtttggccctcctgagggaaatgcgacgccaaaggcgaagatctctatgcggtatatcctactcaatcctgctgaacacttcagcagcgtggtaaaagaggctcgcagcatcgtcctagctggaggaacgatgactccggtaggcagaggatagcgtgcccatgtatttcgcacgtcatactgaggaaatctcgaactcccgtagatgcatgactttcgccagctctttccgacaaagtcggacggggcgatcgcttcgctcagctgcgatcatgtcatacccaaagacaacctgctgactcaagttgttactcttggcccgagcaaacggactctggagttcaagttcgatagccgcaacgacgatggaatggtgaggactcgctcctcgcaaaagataccgcttcatcgctcaatatcgcgtaactcagatcctcgaactaggcgcactcgtttccagcgcgatcaacttgattccagacggcgtagttgttttcctgccctcctatgcctttttggcgcgtgtcaagactgtttggcaacagaagggcttgctagacaagctcgatgcccgaaagaaggtgggtgatatatcgattgggacacgtggcgttgtcttgggctgaaaatcgagggttagctcttctatgaacctcaagccagctccgatgtcgagatggttctccgggagtatgcgaacgcgatagataacgtaagggacgggtggtcagtgatcttgagtctgtggctgaaccgcaagctactgcctctttctaagccggaacccggtaccaaacgacggggcgctctgctacttgcggttgtcggcgccaaactgtccgaaggttagcgatcccgagagccagatcgagcgcctctactgatatccacgtgttggcaggaatcaactttagcgactctcttggtcgatgtgtcatcatggtcggccttccattcgccaatactggctcagttgagttgaaggaacggatgcggtatgtcactactctatctggtgcatctaagacggccgggcaggagctctacgaggtgcgtcccacgttacagatgagatgccgagtcaaatcgctcaatcggttcgtgatcacgacagaatctctgtatgaaagcggtcaatcagtcgatcggtgagaaattgctggacctcatgcatgtcggttacggctgcaagaaatggctgactgtctgtgtcgtctctacgcaggtcgtgctatacgccatcagaacgactatgcatcgatcttgcttgtcgatcaacgttatgcacagccgagaatccgcggcaaattaccaaagtggatcgggcaagacgtaaaggtcggagatttcggtactagtattcgaaacttggccgcctttttcaaagggaaagccaagaaggactaggacgtccgggaagcaacacgtgtagcgtctgatgatagcctccttctgatgataaatttacaacacaacccagccatccgctgcgagcagttcctgagcttgcgccatcttttcccgtttgatgaagacaaagtccgtatcactatcccagggtcgacagggagtcgggtgttagtcgcgcttccgacgatggtctgatccgggacatactaggaggaaatgaccaacacgcttatcgcagccctcgtcaacggcgcgagcatccgagaagcgattccgaccagatctgcgtaaacgggcaatcgatcaacactcccggcggtacgggacgggaactttccaagatccgaaggccgagacgagactcacccagttccataggacctcgaatacggagacacccgaacggaccgtccttgaccccctgtgaacctcgggcgtggacgagctcgtccaatttggcaccgacgtctggtgctgggtaatcagcgtccagcatgatcgagacctcttctttcgtccgggtgatcgtcaaccatccttgcccggcccgtttcagctgatccgcgtcggccgtccgggggtcgaggggttcctcctgatgaccgggtaggacatccgcggcgaataagcttccgatcaagagacctagaccgggggttgtaggcgggaatcgatagaggttgaagctcgacgagtaggggatcatctggagcatgggagattgcgccatggcggtctcgagactgaattcagaagacatttcgggagagtgggtctggttcggtcgggtctggtctcgggcgggtggctgagaagcgatccggcgcggaaggtggggcgagcgagatgatgtctcggaagaaagaacgtttaccgggccgcaatggcgagatcgatttgtggtaccctgttcagtccagcccgtcgcgctcaaggaaatggactggacatggtttgccaattatatgcacttggcatattcagaacgaaaagaagcaagactttttgacagaggaaaacagttcgtccagagcacctctcgctcgtataggctcgatgctatacgagcgactccgcaggaggtcaaatataggtccatcctttgaaaagcgttgatgatacgcgatacgtagaacttgctcggaccaacgagatcacgatccccgtttgcgagacgattttcaactgagggtcagcccgccgctgatcccggaacaaggttgtcgggacgggcgacattttgggggcgggaagaggggaagggaggggtcgttccggatgcagaaatacagagaggaaacggatgagacacctttctccctggaccgcgctgtagtgttttgctttcgggacgtgactgtggactttagcttgcgacgacggacaacgtgctctgacccgggccctcggcgaaacggcgacaggaagagtgttcggtgactttgtttccgcacctaatctttttctcttgtttccgatttagcgcacgacagcgcgcggtgacaaagagacaggcgaggcacggcagcacttgcaagaggggatgggcaagaggggatgagaggaagggatggaatcgaattgaaagcaaaagcgtggcagcgtggcgagagggggagcagggcgtggcagggctttagagggctgagctggggaggatacaaaataaagtcatcccaagcaacccaacagcgcaacacttcccgatcacccacccccaccgactcatccacctcgactcactcactccaccctcttcaccctttccaccttataaactcatctcatcctcttcactcgtctcgacgtcaaaaagtcacactaccttacgttctttaaaccactcgatctcaccgaaaagcacgaatacctacacaatggtgagtaccgaaggtcaagatcgcgaggatcaatgttagccacgtcgaacgatgattggcatggacgacgaataggcgaaaacagtaaagctgactggatcgacctcgtttctgcttgacttgttgacatgtaggctccttccgagatcacccacggtaggtctcttctgcatctctcgctcatttgggtaacgacgactgatgtccgtcgctccacccttattctgcagtcggttacgacaactttgactttgactctaccatctcggtcgatgtcctccgatccctctacctcgcccccaaggtcgacactggcaaggcccccgaatcttccatcgagaagcagtacggcgccaagtctcaatatgacgccgagaagaacaccgtcgcctactcgagcgacaccaagtaccctcccgtcaagttgctccccaacgctgagaggaagaggatcttgggtgagtctcccgattcgacgtcggcttttttttccgctggagaggctggtttactgattaggtttgatcctctgtttttttctctgtccatcgggtgctattttcgacacgactgtgcgatttcatgatgatgtgcgcgtcttgcagtaaccggaggtgccggtttcgtcggttcgcacttggtcgaccgattgatgttgcttggacacgaggtcaccgtcctcgacaacttcttcaccggttccaggaccaccgtgcgtagcgagatgcgacttgcacgacctgatcgatgcgtgacatgcaagatctgaccaaaaactggctttctcctcaccttctaggtctcccactgggtcggtcatcctaactttgagatggtcaggcacgacgtcgtcgagcccttcctcatcgaggtcgaccagatctaccatctcgcctgccccgcttcgccccctcactaccagtacaaccccgtcaagactgtcaagacctcgttcatgggtaccatgaacatgctcggactcgccaagaggaccaaggccaggttcttgatctcttccacttccgaggtttacggtgacccagaggttcacccccagcacgaggactagtgagtctgcctcggcgacgtcgtcgtccatcgatcccccggggctgattcatgtaaccgcgtgatcacagctggggtaacgtcaactgtaccggtatccgagcttgttacgacgagggaaagcgtgtcgccgagacccttacctacggatacatgaaccaggacggcgtcgacgttcgtgtcgcccgtatcttcaagtaagttcgatccgagtggacgctttctcatcccatacatctgcctaacatgcgtatctttttcttacgatagcaccttcggacctaggatgaacccttacgacggacgtgtcgtctccaacttcatcgtccagtgagttcggcttgcagcttgatgtacgcctgtgaatcagcactgatgccgcatcgcctgtcgctcgacagggccctcaagggtgaggacatgaccgtctacggtgacggttcgcagaccaggtctttccaagtgagtcccacgtcgactcgcagcacagatgtcattcgagcgaaatgctgaacatgtccgccattccaacagtacatccacgacttggtcgatggtcttatcctcttgatgaacggtcccgacagccgacccgtaagtgacaatcacgttgatcatcatcgtgacgactttgctcatgctgtctcgcgctttctcagatcaacatcggtagctcgcacgagttcaccatcctcgagttcgccgaggccgtcagggacatcgtcgagaaggtccagaaggaggaaggtactttcaagaggagggtcgagatcatcaacaaggacctccccggtgacgaccccaagcagcgaagggccgacaccgccagggccgagaaggtcctcggatggaagtcgaggtggggtgtccaggagggagtcgaggagatggtgagtcgtaccagctcagtcaggtcaatattgaccgagatgctcacgtcacgtctccgctgctaggtccgatactactcctccaagattaggtccggtgagctctagagcaccaccggggtcgttcctctgcgctctcctctcgtggagatgtctatagagtcttcttttgggatccgttctttcttgcccccctttccacccctttgtaatcggtacgctgcggctgccatgctctctaccttctttaccacgagcagatctagaagtttgccttgcgcatggtagatttcatacatacatatatcacaaagccacaagtctttcaggcgcgccgagcagagtcgctttatcgcctcggccattcttccacggctgatcgttcccacaccgggaattagctccggtcggacgacgagacattcgtccgactcactatcgtacatctctgctgcgatccttctctggatctcggtcgacgtctcggtctggccagatcgccgaaagttagagatgaccaatttgcatggccaaatgctcagtggctcacatcggtaggcgcgacggctctgacaaagcagtatcgtctgctgaccatgatctggcccaggtcatccttttcaccgtcgaggaagctttgcttgcttccacagatgtacccgcctgcttctttgatgatgatcatgccagcctgggaagcgaagcggtcagagatgcttttagacgcttgatccgcacttggtactcacgcagacgtcccacggttgggaaagagcatctctacgaacgacaatgacgtgagtaatgagccgatgatacgataagagtctgcaagagcaatggtacgaactggaagatgtcgatctgccctgacgcaaggcaagccaacgctcccgtcgaggaaccgatcatacgaatcgcatgtacctctttcccaccttgatccaaggccgagtacagtttctttgcattggcgtacttgggctccatgatgttcggtcgtcgaccgcttccccctgaacaggtaagaacttcgatcagagagctctcggtatcatggcaggcagacttacattgtaaacacacactgcaactactcaggtccttgaggtgctgaggtcgcgtacccaagcggacatcattcttgaaagctccacctccgactttggcccagtacttacaagagtgactgcgacatcagcgatgtccacttagcgctcttataggactgagtcttacgtaccaattcatcaaggaacggttggctgatgacccccacgaccgggatgcgtttgtgcgcaagaccgatcgaacaacctacgtaaggactgttgagtgagatcgcgttaactgttgacgtgtattgggtttccaatggtttcgatcttacaagccatgtacgaagctgccatgagagaaagatatcagcgcgcaggctgaaaccggctgaaacaagaccgtaacggaaccacgtacttgttcgtccctttgtgaacagcatgaagcggattacgttgcctttcagattcagcacatacgctcttgtcgtcattttgactaaccgtcgatcggatcgacgatccaagtccactcatcgtccagctccaccttgccacctttatggctttcttctcctacactatttggcctcgcgttccgtcagcaagctgatcgtgagctaagagttctgcggactcgactcacaatttgtgttgtgggtacttttcgcctatcgccttttttatcatggcctctacagcaaggtccgtctcggtcaggaagtcggtagccgacgtcttggtatcggccctcgcaaaggtttcgaatcgcttagcctgaccagccttgatcattgccccaccctgacattatgtttcgaagagatcagcatggatcatcttcctttcgtgctgtaaaacccaccttgcgaccgaggtcgagagcaaattggaggtactcctcgtattgagactcgagattttcttgtgtcatgtcgtcgtgaggggcagatcactcgtaacggactggtggaatagattgaacactcttgggacgatatgtaaaatccaactctttgtgtgaacataggtagatatatatacccgcaatctcagaaacgattctttgtccactacgagcgagaagtggaccatcgacatcgtcatggtcgcagtcgaacaaaggacgcactcgatcatgatgaaaaacctcgctgatcggtgaaaaaggccggaaagccacaaacgttgcattctcgaccgactgctgaggaaaggggaaccgatattatcgctattcatgctcagaatacggtgcgtatcatacaggtagtacattcgtcggacgaaggagtgatatggggcatgcagaaaggtcgttccgctcacaaagggcacgggacatgggtgtttcaaccggcaggcaaaggatggagcggaaaggaaaatcgttgacgcagaaagaaccgtaaaaacagatcactgaggcgagatgtcacagcgtcaatttcatatccaagaaaagctgccttgtacgacgtctgcactcacatctagagtgattcgaagctgttccagggggattggcacaaagctgtcaacatcgatgccttgagctgcgagagaagagcttcgggtcagcggaactcgtagcgccgaaaacagtctccaagatgtacccttcagagccggttcagcgtgggtcggtaccagctggtggatgagatcaggacgggcagagagttctgcaagcgaggagacggcttgtcagcacgtgtcttgatgacctggcaagacgtggcgacgtaccctctttggtaaagttgaacagctccggcataggcttgccgttgggcagacgggcaccctcgatcctcaattcgtcaaagaattcgtgtgtcaaagcttccatggccctaaataatcacacaccgttgcatcagcgactcgtccccgctgcatgccacgcttcctaaagcactcacgtgttacgggcagtaggagtgtactgcaaaaggttggtgatgaggctgatagcatcggcgggagttcgtggtcggaagaccttggtaaagggatgaggcttgatctgggggaacttgtgttccatgtactattcaagcgggccccagcatcgccggtcagcgaggagctcgacctctcctagatctgtatcaagaactcacgttggggttcatcgtcttgatctggtccctggaaggagtacccaagaccttgatgatctcgaccaattggtcgatacccgactctccagggaagaggggttgacccaacatcagctcggccatgacacatccggtcgaccagatgtctatagaaagagtttccctcgacgtgagccgctcgaactttcgccgtctggtccagacggagacttaccgatgttggtcgtatagttggtagctccaaagatcaactcgggcgctcggtagtacctcgagcaaatgtagctgacgttgggttcgcctgccaccaagatcttggccgaaccaaagtcgcacagcttcaagatgccggtcgccgggttgagcaacaggttctgaggcttgatgtcacggtgacagattccgaccgagtggatgtaggctagcgaacgaaggagctatgaacaggatatcgtatttcgaattcagtttggtttctttgagtgaacacttggtctgcatgaatcgggtgcatacctggtacatgtacagcttgacctgcagcatgggcatgacctgcttgagcttggcgtaatgtctcgaagctcggtagacggtctcgggcacatattcaaggaccaagttgaggaatacttcatccttctgctagggcgttcaagtactacgtcaacattcgcgcctcggcgtttgatttcgatggctctgatcacgcgcaccttgtcaccgttcgagtagaaaaaggccttgaggtcgacaacgttggggtgcgagacgagcctcatgatctgcagctctcggttctaatcaagggcaagattccgcgtgcgatccggatcagctcgaaatccgattttgaggccatcgacatcacacgggggcgagcgaggggaggacgcaccttgaatcgcttgtcctgcaagaccttcttgatggcgatatcgctctcgggactctcactgccgtcctcttgcttctcgcccatcatcctggccgcgtagacgacaccgaaagacccgtttccgacaatcttgcaagaggtgtacgagatgatcttttcgtcgcccgacttgccgtccgaggcggtcacggtgatcatgcgggtggggtcatcggtcgctgtagacgatcaaaggaggaaagagccgacggggcggtcagccttttccattcgtcacagttgtcaactcgggatgacctgatacatccgcagctcgagagatggcaggcggggttcggtccacctcgacgtctctctgccggcgcctccatcctctcgagctcgaacgcccatttcggtgggatttgcaacacgtctactcacgcgagaccttgaccccattgacgtgtcctacagaagacatctcttcgatcctttcttcttgctttatcgagtccttgaacgggtgtttgcccttgtcttcgtcctgaaagacggtcgtgggtcgttgctgcgaggccgggtctgagcgcttgttcctcttctcggagatgagagaggagaaccgtttgaggtgagatcgtatggctggaagcgcggggctggttgcgagagggaggcggtgaggcgatcgcagacgatgtgccggtacgatcgctgtatcggcgtcgaacgcaacgatccagcgaggagtagggaagatcgaatgtggtcgaatatccaacgacgccgcgtgcgggtcgcaaagagccgaagagcaggatggtgacgagagcgagattcgagttggtttgtattagctcctgtcactctgcttgaaaccctggtgctggcgacccaagccacccggtagagaaatgatcgactcacgtgttgttgcgtatgtaagagtactcgagcctttgaatacggacggatgcgtgttcgagcgatgagctatataagaacgatcccggccggtattcagtcagcccgtccaggtgaagagcgtgcttcgtcgtcaccgtcggactcactctactctaagctcagattagatctgggaagaaccacttggaagatctccgcctgtgatgaatggaggtgaggatcaggatcggtggtgcgattcggtctcatggggtttcaaggaccggcgtacaaaggtgggctatgggctcgtgtggtggctggttcgtgtgacgtgctgcgtgtttcgtgacaatggatgagagaagatgatgaatgagctcgtggtgagatccagcatgagacggtcgaggcggagtgatgcataccgaggtgatgtctaggtgcgtgaagcgcaattgggacgaggtcgcgagagggttgggattccgtgacgtttgctttgaggcgagcgtgaggagagacgatagatttcgcgaccgatttgtggggttgcgtttgaggattaagatctgtgctggcgagcggtcctgacataggccgactcgagaggttgacgaggtggatgtatgtgagtatgtagacgagtagctagtaggtaggtaggtaggtaggtcgtgcagctagctctccgtgttgcctggttggttcaccctggctggcatgacgagcgagcgagtgagatggagcgaacagcgtgacagcgagcgatgcaagcagcagctgctcaccgaccgacccccctggcttgtcccgccctgcccccgtgcccctcgcccgctcggtcgctctccccctcgttgccgttgcgttttcgctcatcccccctgctccctccctctcgctccagcttgttggacttttggctgggagacaggcagaccaggccacccatcgctcgcacgctcgctcgctcactgacggcctgcggtgcagcctgctcagggcaatttacgaaaccctatgctcttcacttttgtgcaaacgactcgatctgtctaaatatcttcccttcttcttctcttcacaacgtcatcgtccctgatcaaaggagacagacatctctacatagaagtagaagtcctagtagtagaacatacggcaaggtcgaatccccttcccttgctattctcttcgtccccgtgaccgttctttcaagactccctactacggatctcgacgagagcgaagatcgaaaagtgacgcatcccgtccttcatcgattcccctctttccactctctcgcctgagcgacagagccgcggatctacaatcaagaggaacgatctctcgtacgtcgagatttagacctagccggtgccaagggtcctgacctgatctcgagattcggcgctctcgctttgattcttttcttcgggctaggtcggacgagtttcgtgaccatcgacggatcaaccttcgcgttcatcggcaaggaacgataatcgtcgctccgccttcaaaagtcttgcctagcacaaagacatatcgcctggcgacatcccgcatcgattgacggttaccgagcggatctctgcaacgtcctcgccttcgccacctcaccaatcgtcgatcgcctcttttcgacccctactcgccactatcaaaagcttgaagctcgacccgcgctccgcacgtgaacaaaaagccgatcaatgagcaaacccacttccactcccagtccagctactcctcaacctgccagtgctctgaagtcttccgcgtctgcctgggcacgcggtccaccatctacagccgcgactccatctcaatccgtcgtcaactcgaccaccgcgtctcccagcggtaccccgcagttgaaccaggcacctttaccatctggtagcaaggatgtatcgagcagcaccaaggccatggctggaccatcgcagtcctcatctcggcctcagcattcgcggaaatcgagcctgcttgccgtaggtggcaacgctgctggtgcggcacaaaacgcttcaacttcaaacgatagcacatcgagcgcgaagccaatgaacatttcaggccggagtgagtggctatcaatgatcgcatcgggctagactgacggattattgttgtatactctgtacatccccattcagccaacgccgccggcatcaactttggctcggtcagtaatcccaacgcagagttatcctcgtctccggctgccaacccgaccacgggaacgcatctcgcttcgactgacggcgtcaagagtttcggtagcgtggaggcggccgaagcaaataatgaggacaagagcgccatcttgggtcgcaaaccgccccagactggcggtcccaaatttgacgtgaacaagctgttccagatgcccgcagcagccgcttcgtcggtgagtgcgctcttattgagatgatgggacggcatgttaagcatctattcccgcttccacttgaacttgctccttagcctgtcgtgcagcaagcccgaggttacgatgctcatggaaggcccgttcagatgggatcagctcagaatgcaggcgctcttgcccacccagccagccatgcatctggctcttccggcagggtccagaacggcccaatgctcaatagccaaggctcgccggcgatgtccaaccagaacccgcgatctcccaccatgagccatcagcaaaccaacaacatgagcgcgtttgcaggtggacctggaccggctgctttccgtccaagcaacatacaggcacctcaaggtcgaggtccccctaaccagatggctggaggagctggccggggacagccttcgcatgcattcggaatgcatcctagtcaacagcacggcggtcctgcctaccctggcatgccatacggtcctcaagggtactacgcttacggatactatggagctgattcgccatatggacctggccctggtcagtggcagcccgctcaaggatctacacctctgtcgcctcgagctggcaattctgccctcaacaacgggccgtcgatacctcaattacctgcctctggatcaagcccaagcgctggtctaccggtcactggcacccctacgaaccgaccggcaccgagtcacaacacaagtaacttctccacctcttcccaaacttccggaccctcgacgcccgctcagaatcacgctaggcccgtatctttccaacctgggcaacctttcacgccgggccacctgagctcaccttcagccaacttgcatgcttcggccaacgcctttgtgcctcgtaccaaatcgagtgcgatcaagatcactcgagctgacggtaccgctgttgacttggcctctgctgccaaggaattgaaaacacctacccccaccgggacgcccgccgtcgcaagcgctcccgctactcccgggacccctgtccccgcgtccaaaccttccttacctgctatgcctgtcgttgtgagaatggagacggaagcgcagaaggctaagcgtctttcagatcaggaggaagagaagcaacgcaaagcagtggaagcaaaggaggaggccgagcgacgcgatcgggaaactgcacgcaaggataaggaggagaaagaggagaaggcacgccaagaggctgagaatgagaagaagaaggtatagttcaggtcgattgtcagcaccctgattgttcaactgacaaaacgccgccttatcaggccgaagaggctcgacgtgtcgcccaagaagaagcagacgcacaggctgccgcagacaagtcgaaggaggaggaaaagaacagagagcaagccgagcaagcccagaagcagcgcgaagacgaggctgaccagaagaaggacaaagaggaggaggatgctcgcaaggctgaagctgatgccgcgaaggaatcttcggcgagagccgagagcgagagcgatgtcaaggttcgtagcactgctggcctgcctgctaagccttcggccgaagttctcgagtctgctcgagcgtctcccgctccctcagctctggctccgccttcagaaggcaagactagcaacgcgccctctcccgttgcctctccttcattgtctcacgccactttgcccgccaagccagctgtcgctgggagtggcttcgcccgcaagggtgctcctacggctctcagcttgccatctgctgaggatgggtcggagcccgctcagcaagcgaacgcttcggcacaagctttattgactgcgcgtcctatcgagaagctggaagacatccgatatcccgaaggcttgcagtcgcccaacgttgaactcaacactggggcgcagcccggaaagtttagatacgatcgcgatttcttgctccagttcatgagcgtctgccgagagaaacccgaatctttgccacctctggatcaattgggcatggagcgggaccatggcagtatggggcgtggtggcagtagccgaggtggtcagcgcacgggcagccagatgggtaaccctcgaggtggcgccatgggcattggtggtattggagcgggcggtatgggttcgttcggaagcaagaacccggttggaatgggctcattcggcatgggtaccttcaaccgtcctgctgctactagcgaggagcgaatggccgcctctaggatcggcaacatgggcaatgcctttgggtcggcgcggaacactccgggtatggctcgcacgcccagccaatctggccctggaggtatgaacatgatgacccctggtatgggccgggagacgagtcgggctggcagtgcgaggggcaagagacgaggtgaaccgagaggagcaccgtcctcgatgggatccggtcaactcgaccccgacgtcgctcccctggaattgtcggccaaccgatggacacccggtgtgcagtctcgacgacccggcgcgatcgatgaatcatctcctgaatacgttgagcgtaaggtcaagggtttgctcaacaagcttaccaaggagaagttcaactcgatctcggatcaaatcttggaatgggggaacaaatccatttcagaaaacgacggtcaaacgcttcgactcgtcatcaagctcatcttcgaaaaggcgaaggacgaacaattttggtcgagcatgtacgctgagctgtgccataaattgttggagacgctgagtcccgagatcaaggacgagcaggtggttagcgccgatggcacacctctggccggaggagtactgttcaggaagtatctgctcaatcgatgtcaggaggacttcgaacgcggatggaagaacaaggaggacgcttccgctgccgccaagaacaaggcgtcggaggacgagaagaacaaggctgctcacgccgaagccgtcgctgcgggtaaacaggtcgaggaattcaaattctccgacgaatattatgcggaacaagctgccaagcggcagggtctcggtttggtcaaatttgtcggagaactttacaagcttgacatgctttcgctcaagatcatgaacgcatgtatcgtcaagcttttgcacaacatcgtcacgcccgatgaggaggacgtcgaatcgctttgtcagcttatctcgacggtcggagagaaaattcagaagaccagtcaaagtgcagctggcacccttagcatattcatctcgcgtatgaccgagatgaaatccagtacgcatatctcttcgcgaatgaagtttatgcttttggtgagtccctgtctcgttgtcgtgatgaagtcaagggcaaaactgaatcacagactttttgtaggaggtcatcgagtcgtacaacaacggctggaagtcgagggcaggacaaggacagagcggcccgatgacgatcgaggaagtccatcgacaagtgagccacccgtcaaagcactggatgcggttcgcgaaagcgcgctgacctaaagttgtctcacaatcatcacaggctgccaaggagcaggctgacgccgcacgtgcagccgcaaatattcccatgagtcgagatcagagcatgtcccgaggcggttcaagaaggggcgaccagcgatcagggtttggcggacctcccggcgcttcggatgcatggcaatcggtcggaaaccgaccacctcctaaggccgcggatatgaccggatttgggaacatcaagagtggtggaggtcctgggcccggttcgttcggtcccgcctccgtattcaaccggaaaaacacgaagcccaagtctggtgatgtgacgcctcccaacgggccggctaccacttctgccaacccattcagtgcccttggtatggatgacggctccggcgagatgtctaccggcgacgacagcggctcggcagaggctatgcctcagcgaaaaaggctggttttgcagccccgtacggtctctagtgccaacgtcaatgagtccgacgccgctgagggttcggcggccgaatcggcacagggtggtctttcaaaagatgagattgatcgcaagatcaaggccgaccttgccgaattctggggcgagaagggtactgtcggaacccgaaataccgatgatgctgtttcgtacttcgaagggatgccagaagaagggcgccttgagctggccaagaagctgatcgacgacgttttccgcttgtcgagcgcggccgacacctctctcgtaacggaggcctttaccaaggcgatcgctaaagacgtactctctgccgagactgtcaagaataggcaagtcctgagcaccccggcatttccagacttgcaattaatgatcctcttcatatagtcttatgccttcgatcgagctactcgacgatattgctgttgatgtgcctcaggcatatgcattcgctgcccaaatcattgtcgctgccaagctgtccgaatcggacattgacgagctggcagacgcgatcgaagtcttgggagaagtcacccctctgccgaaggacaagctgaaggcacaagtacaaaagctgcaaggatgattgcggtatcggagagcgaagaaggaccaggatacggcaagtctcccaccaagcgaagagctcggcgttccactgctaagtctcaatcacgcttgtctataggagcatcataggggtgtttacacgatatcacagcagcagcaagggtcgatcgcggaaacgtcgaggtcgaccacttcaccacataataccgattatcgcgatattgacagattttccggcccctatcatttgttctcgcctatcttatgcatgtgcaagcacactatatagattcacatccagattgtctgttccgtacgactccattggacgtacgatgacacgatttgacagctgatggctcactgcaaggggatctcaaggcgtcctcgtcggaagctaaacctgcagtcacatttccatcctttacccggcagccggccgagccttcgtcatcgttagtcgcaacgatcaagtcggctgcccggactcatcgacctcatcggttcaaagtctcctcatctctgcaacgtcatcaaacacgggccgacatccagaataaactgcagcttttgccatcggtccaactaacagatgctacggtttcggtgtatagcccgccgcactgttgtcccatcgatcagactacccaaaactcgaccctcaaagcgttagccgcaagcacattcgactcaacgagagaaaggcaaggaaaggcaacgtctagaagctaaatcatgaccgcctcggtcagtcatcacggactagcatcgccgccccttgctactatgtctgaggagtcggacgatatcgaggcgacttcaaggggcggaaaggaagcgggaactacggacgaggtgctgggttccatcccgaccccaatcgtacggctcctcgtcattctggctagaccaatttatctcatgcgtaaagtgattgaaatcatcagctggaagtccacaagcacggtcgatagttggcttgctttagggtgttggtgggcactgtgttttggcggcaggaccgcctggaggtaagtctcactcccgatatttagcttcgtcgagctggaagttgattggaaaatatgccaccgataccaatttgtaggatctttctgcctgccttggcaattatgccgttcttaccgatatctatcaacccttctatactattgccgggcatccgtgcagacacgacgataacgtcgcacagcgcggacaaacccgcctcatccagcaccatcatcgtcacactttcgcatcttcatgctatcaatgccatgttaccctcagcggttctgacctcgaatcagagagcttggttccgcggttggcggactatcgaaaggcgccgtttaatcagaggtgggctgatcacttgggtgacgtggatcatcttgaacgtggttctcggcggacgagcagtaagtcatgtgtaggatgtactgtatccgcaccaaaatcaaccattgactcactgaattgaatgaatcgtagacgctcgcgttggcggggtcggcattacttctcgcctcttcgcctgcgataagggcgatgtatggcctcttatcccaatcactttttctccggcgatccgcagccttggtgttcctggtggtctttgggtcaccaccttcagtctcgaccgcaacaccgacaatcataccagacgggactgagcagatatcggctacggggttcagaagctggatccacggcaaatggcaatcaagcagtcgaccgtccctggctttccgccttcacccggcagatgattcggtcattgacaatcggccgcttacagaagcaaagctcgactctcagtcattgtcgagccctgactcacccccggtccgctccatgtccgagcccctgttctttcgattcgaactgcaagagaatcagcgttggtggatgggattggattggacgtcagccttgctgccacaggaaagaccatcttggtgtgacgcatacctcaatccttcaagcccccctagcggatttactcttcctccagaaagtaccatgtatctaccggaacctcgaaaaggcgatccaagtggcaggacgaagcgggttagtcggtggcgatggctcgacgaagactggtccgtggtgaagcgaataggaactgcaagcctaaatcacccgatgtcccccatttccctgcgtgaaggggcaccatctggtcatggacgatcagcttcgatgtccctgtcagaaagcggtcctgcgccttcggcgacatccattgacgaaccgcgcaaaggcatcgcggaacaggctttcgtcaaaggtctggagcgcctcaaggcgagaacgatgacaagctcgagtagcacaagtggcgggtctcccgcgaaacggcccatgtctggtgattacggggagcaagctagcttgcaagaccgagggcacgtcaatcccagtcgctcttcttcggaagtacagagacgtaaatcgtcagcagcatccgatttagctgaagcattaaacgggaatgcatccgcaagtcacaacggttcgagcgcgccgcgtgttctggggggaggatcggcgaacaacgctagcggctcattgtctttgctgacggatcttgaaatcgctacggacgtcgatggatggtgttacggtgacaataagtgggagaatatgggtcccagaggcgggatgggccgtgtgagtgataagaagggcatcagggcttgacaactcagtagaattgacgtgtacatggcttcgcagtatactagaagacgaaggtggcaaaggagagccatttgcgaagaggaagtcttgtatattccggggcattcagaagcccccttgatcgaacaggatagtcaagaaagcgagggacacacctcgtcatccattgatatcgctggcaaaggaaagggcgtgctgcctggatacacgttggaattaccgtcaggagctgcgtccccaactaccgtgccagcgaccgtgatgacgggtacggcagtgatcgaagaactcgatattcatccgcggcgggacagtcgctccagcgagagggaccacgtacttcgtcagcggctaaagaatgccatggcaaacgtcggctcgtagaggactgctatgcgctttgccggcatacaccaggccgtacacttgcgactttgcgctgtgcttgcgctagtcaagccaatgtaaagctgagtggcgcgttacaatcggacatacctcggtgctatcgcaatgtaccttaaggagggagaacaaccgccatgacgggcttcgtccaacaaacgtagtcgagtatagccgggagaaaggagatgagttggggatctacacacgtcaccgcgtgggccgcaagtaatggattattgagcctttgatgtcgtcacatgatctcatggatatgagggtattctcacatcctttcgctatatctgatgcaatgctcgggccacgccgacatctcgcttcgcttatgctctggccactcgcatcccttctggacctttgtcacatcgtgctaatctatcgtgttaattatacgtgttgggcgtaacaatcttatttgtcatatcttgttgatgcgtctgtgctaatgctgggtatgtcgttatttgttgaaaagtcgtaagaccaagaaatcctccatgtcaatgccgtcctagatcccctccccatctccgccttgcctcgattcaggcttccgctgtgccaacgggacgcgcttgaagacatgactctcccagccgtcgatctcgtcgaccacgacctctctgaccaactgatagcgtcccagcttgggcatgagtacggcccagatgacccagtatcccgctcctgcaaacatgatcccccatcctaccacacaatgcaggtagtatggaaggttttcgtaaatgttttgcccgtccgtgggcggaatgaagggagcgatgatcaggtagacgttggagaggaagaagaagacggcgatgggtagcgtggcccggaccggagggaagaagttatattcttcacggtggaagtagaggtagacgagtccaagcgcgacaaacgagttgacgatggccaaaggataggagatgacgctgcgaaaggttgagaggttagtaaagaaacggaatgactacctcatatactgtggcgactaacttgaccataaagttataagcatcacccgggggaggggcgagcatgagaatgaccgaaacggcccagtgttcgaaaagtccagccagaggggcgttgaaaggtctgttgcttgcccaaaaccgtgagaatggcagcactccctcacgccctagttcttgtaccactatgggatcgaaaggtgattgaggtgattagtagacggccacgaggtcgagcgatgtctgtaggcagcttacgtcgtccttgagagaatatcacgctgagaacgtttccgtaggctgagagagccacaaagaccgacaaagcacgctcggctcgctcgccgaaaacgttgcggaagaacgaagcggccaggatacgcccggagctcatgatttctgccttcggaactgccgcaaaataggcaatctacgatatggctaggatttagcagtgtgattggtgcggttcttcgacctaggactgacgttgacaaacatgtacatcacggcaaccgagcccaaggctactggcgcagcgattttgagagtcctgaccggattcttggtctcgctcagagcgtaattgacgttactatacagcaaggtacgcatcaatgcggaacgtcagcgcgcggctacgcttgttgtgcgctggatcccagccagttcgtacctgtaacctgtgccagaagatgcacgccgaaaaagacccttagcctaggtacttgcgagatccggtacagcctacacctacctatataggcccaaatcacgttgtaaagcgaggtgacgatcccatatgcgcttccggtagtcccttcgaaagcgttggagaaattatcgggcttttcaattttgagggcgcctccaagagcagcctatcgaggatgacggtttgagctgtggagggagaatttgtcgagaggcgccacacccacgtacccagccagacacaacgatcacgaggatgatacagagcttgataactcctagaacgttttgaagacgcagaccccacttgagtgcgcatccgtggatcaagaatgccgaagtaatgcacgccagtccgatcgcccgctgattccatcgatcgacggggacttgagcggcatgcaggatatattccccaaatacgaccgagttagaacccgcccaacctattcggaataaaaaaagaagcaatcagccagcagccaccgtccagaactttgacggttactcaccaagcaggacgatgtatccggtcaagacggccgttgccaggaatttgggccgtcggtagacgaattctagatatagcttttcaccgccgttcttggggatagctgtaccgaactcgaggtataccatcattcccgccagcgcgatcaacatccctacgacccagatgaagagggccaggccgacacttccacaaaggctgagaatcgcgcttggtgtggcaaagataccagtcccgatgatccgattgaaaatcagaaacgtcgcagaaatcacaccgatttgacgcttgttctcgctcgcttcatggtaagggcctgcggatccggggcgggcagggatgagtgggatgccctggcttgcgcgtttcgccaagtctgtcaggttcgaatacttactgatcgaggcctcattggtatagtcgagagctacttttgcctcggtgtctgacccgccgcctgtcttgtcttcgatagacgccgtagggctggacatgtttcttgtcgttatggtctgaagaatgaactacaagtctacgtcgcgcaatgaacggcgtcgttgatcgatagccacctcttatcgacattgaaggttgttgtgggagccagttgcagcctctgatcgtcgtcaaaaaagttggaagacgagctcgggcccgcccttgacgccataatccgacgacaatgcccgcagtgccttggcgatggcgaaatcacgcgatctgggaattgcgttttctctggccggaaagctaggtgctgggttgcgaacgcgattcggaaatttgacggtcgtacctacgttcttgcggggaacttggaaatgaaatgggaaaaaaagcaatccgggcaagtcgtcaaccgggactccacgaaccagcagcagcaggtcgcgaaatctcctcggtcacgcctttttgcctcgtgatgcgaagcgaggtttgagcggcattgacatcagccgccgtctagctagcgcgccaaccagctccgatctgatcggcgcgagcggctaatttgtcaggtttcatcaggaccactaccaccaccgtgtacatacttgatcacgacccgcacggacaataatctactgatctgctactactctgatggtgagcatgacgatgcacctttgttgggcggagaaacacctcgtgtttaacgccctcatgataggacatcccgcggatgcgaacgatgcatcaaaggaacgacatctgcaatacgtcgcggaatggcgacattcgaaaatcgcgccatcgggggttcatcagagcgagcagcgtctttattcttttaacagtcatgacgagcagcggatgggcactagtctaagacttcaacaagtcttgtcaaagcccgaggttgccgaaacctctcgataatcgtggtacagtgcatagtagtgttgcaaggtaaacggggatggcattttctcatagacctcttgctacaccaccgcaatcacttcgaataatgcttcgataatagtgttggcgggagaatacctcagccatttcctctctgtatccgagcctggagcttcaatcgcggattgaaccgaggatggtctagacttgagcggtgacccccaggttgaccacggccgagaatgcggggacaggcggaatgcacgtgaaccagctctcatagttgaacttgaaactggctggtacctcgtgagccctgattggtcattccttgtatacgatcgatcaacttcattactggtcacatgtaagaggagcacccaagggactgtagagggcggtgccgttcctttgcaggcggtatacctggtgcgacggcctgggctcttggctaggatttagctgagacggaattgcatggcgggctaaaccgttgacgggaccagtcgtcgttgagacacttgggagagattttaaccgattgtattagtagccaggaaaagttcagagattaagccgtgcgctcggtcgacggtatcaacgtacaggacctggccgtcttgaccttgccttgtagtccttccgtcgtacgcccaatcacgatcctaagaaacgctctctggagtggcccaaacagacccgaaggttgatcgctcacataatgcaactgcccacgaaccgcatcactgatcattatgatcgatcttccaagcttttggagttcctaggatatacgtttagcgtcctgacaaaccggaatgatggccctgatttacaaagacggcgtgacaaggagctgacagcgcgatctaagacagccgtttgcacggcttacaggatggcgccttgtttgatgtccgggtaatccaattttatttgtgcatcaaatctatacgtctatgatacagcgatcgtcttggccgatacagatcgtgttttacgccgacattttcatctcgatcttgcccatcggcttgtatcctaccacctcaaaatcttccgtcttgaacccgtcgatactgcctatttcttctcttgtccgcttgatgttgagcttggggaagtctcggggctctcgctcgagctgagtcatgagaggctcgacgtgatctttatacacgtgcgcgtcacccatttgaagtatgaattcgtgtggttccgtgtccgtcatgagggcgatcatgtgggtgagaagcgagtaggaagcgatgttgaaggggacgccaagtccaagatcgcaggatcgctgatacatcaagcaggagagcttggattttgcgccgggtgtttccgggagagtgacgaagaattgacagaacatgtgacatggtggcaaggccatctgggacagatctgggaggcgcgttgagagcacgtcagctgtaaggcgccgcttgagccggtccccatcgaactcacctgcgggattccaggcgctcatgattattcttcgatcagtcgggttattcttgattttgtcaatgacctgagccagctgatccaccccttgacccgtataatcgtcctcgcatgtcttgtatgtcgctccgaaatgcctccattggaacccatagacggggccgagatcccccgttctccggtggctaagcccgatccggtcaaggtattctcgagacccgtttccctcccagatattgacacctctctcgctcagaatcttgccgtcggtgtgacctgctacgaaccacaagagttcttcgataacacctcgggtgaacacacgcttggtagtcaagaggggtaaggcgttattggcgagcgagaatcggaaggatgggggcgcaaacatcgcaacggtacctgttcctgtccggtccggacgatgctggccgttctcaatgacgtgtcggatcagatccagatattggtactcctcgtggcgtgtgttggccgacaaggctgcgagatacggcgactcgattgtcctaccaggggcagtcgatccgcccgtcgacgtaccgctgcgaggaggcagatatgaataagaaaatgcaaatcggaagaggtcagcctttggtgatattttcagcacgtgacaccgcaacccagttgttcggcacatctcggtcgagcttcacgctagcttcttgctcgccagggtcgaaacgcgtcaatcgctttcatagacctttcatgatacagtggcaagtatcggtttatcgctacactagtccgtctgcttcgtttctgcttttcgccgaggcgataccgatcccgagcttgacgccgttccggtcaaatcctttgtgtatacagtctttcgttcgcgtcctctgccttcctacggtgtgccgcatcgccctcgcgcaatccttcgactcgaacagtctgtcgcctactcacgcggtacccgattgctgctgctcttgatcgtcccaaaagctggcccagacctcaacccctggcgcatattcaacctcggttccggcaccgaccaagtatacctgacctctcttgacctcttcgacgtcggtcctagttccgtcgaccgtctgggtaattttgcccgcagtggtgttgacagcggtaacaatacagacagtaggcccattcaggggagagatcctcgtcgattcccgagcgtttccatcgacgtgatacaacgagaattcctcggtaggtacctgtgacaatacgaggcgcatcgaagaatcagccccagctcaggcacctcgccatgtgacagaccaaccttgtagattgtggctccggctccagagctcaatttccactcttgcttgctcaacttgtactcttctcccgacttgggttcgcacgtaacggcatcgatgaaaaggtcgacggagtccttctcagaagcggggacaaatccgaggttgagcacattgtcactagttgccatgagctcgatgatttctggaacaggacacgaggaggcaagatggtcaagacgacagtccccgtgaaccgaacaaggcagtaaaccgcaaactcacgaccttccaaccaagcatgaacgccgtcggcgcccacgtagattccttcaccgggctgcagttcgatgaggttcatcatgaacctatgatgacacaatcgccacgacagctcacaatcagcctagcccgaccgctaaaggactcgccgagctcgaccggtacttacgcggctacgacgctcccggggtctcccttgtagtactgctgcatctttttcaaccccttcaccaacctcttcttttcctcttctccgagctcggcctgcccgaaagcctcaaccccgtctcgctcgaaccgtgccaatagtccttcaatggcggcgtctacgtcgttgccatccctcgaagctgactcgtcgttgttcaagttcaagcctgtgcccacggctagggcgtccttgacagtgttgatcaacccggatgtcgtcgatttgggatccattcgaaggacgcttctgaccaattctttcaactctttagggccagcttgcggagcggatacgaatcgctggtacgaatcaaacggacgaagcaaggcgtccaattcggggatcgaggtgagcagggacttgatggtggcgatcggttgaaatccggcgaatccaaggaacggggtcaaggcgacggcgatctcgggcttgtggttaaagtcgctgtgggatgcggtccggaatttatagtcagctacaggcctcgcttttggcaacggcagtcggcttacgcaaattgcttagggttctctttgtgcagcttctccgcgagctccttgtccggatgaatttgcagcggtagcgctatctcccgccaacagcaacctcgtaagcgttcgtccgtgcggtacctcaaacgacacccatgctgttctcaccttgtttgcatgtcaagaccttcatcaagaagggcaaaaacctctctcccttgcctgactctacaggtgcgccgaacttttccccagccttgcccagtagctctgggtgatccccgaggtatgccgagagcgatttcccaaagtaagccggagagactgtctgcagggcttgagagacgagcgatgtggttgatgggttggggtaaatcttggccggtgcgttggggtgggtagaggaaatccagagctgtggatgatgggtgtgtcagtcatcgtgaccgtgggctcggctgtcacaaagcgaccgcaagtgaatctcgatcgcgactcacttcggcataaggcgtcgattctccgaacttccaaccaggaccgccagcctcgggtccgaattcagagatgatggagtctgacccttctttaccccctgcaatataaaccaaagtgtcaggatcgtcgatgccagcttgctaacataagggagagacggtattgtcgatgtcgataagaggaggacatgacaaggaagaggatgtcgaggaggggcgcgaatacacgtattatgagagaaaacgaaggggaatgtcgattcctgggagagcgatgaaatcgagactgcaatctcttgccgagactcacatgggtaattctgagcttgaacctgcagtctgatctacaaattataggcggcgagattacaatgagcgaaatgtagataggattgaaggggaaacgatggcttacgattcggtcggtcatggtgcttatggtcgtgaatagctgatatgttggtggccttatgttgggatttcttcaacgcaaagtcgagattctgacacagtggagttgtccagatacctcgcctatctttgtgatccctgtggcctatatacactctaatagtttttattgactagtcgttgagattgtcgtcgtcatcataacattattatggcccatcatcatcatcaacatgtgtgtcgcagaacgggaatcgaccctcattacacgcgacaacgacggttctctcgtcagccaaaatgcaaagatgccccttgatcgcgtcgtcgcgtcgaatgatgatagatcgaatgacctccactttggcgtcatcaaatcactttacaaacctcgttgctttctagcttttcgagccaattagaagcgcgccccgatgattacctaataaaagtttcacctcggctccgataaacattgaccggcgatggttcaggaccccgtctattgcccgatgaaacgccgaccgactttcgtaatgtgttcaactccgaagatccaccttgacatctcttttccatgtgcaggaatgcatgaaacgacgctgagcatgatcacatgtggataggatcaatcgcaacgccgaagccttctccttcggaccgtaatcagtcagagttagaaaggtatatatgcatatccgtccatcctggtcgactcaagccccacagattcacccttaaaacgttgttatacccaatagctatcactcaccgcggtctcccccattatcttcccccacgatgctcgccactcaatccgctccggccgaccccttccgtcaacccagtcaaccggttcaaccggcctatagctcgggcatcatcgaggctgacgctcccgcccctacgctcaactcggactcgtccctcgtcaagcaactccagcaagacggctttgtcgttgtcaagaatgtcgtcagcgccgaaaaggcagagggatacgttcaagccgctcatgaatggttggaaggcttccaactcgggtacaagagggacgatcagtcgacgtggagggtcaagaacctacccaagcatggaaagtaagtctctggccaaagtgactgttgacggaggtgagggaagctttttttgacgcatctctctcgattaactgtctttctcttccatctccgcttccacatcatgatcaactcgattacgacctgaactgttctcgatcgtacaggggcggtctctattcgctctactccatcgcccacgcacagttcgtctgggacttgaagaccgaacccgaatacatcaggctcttccaagaaatctggggcacggagaaactgctcggtacgttcctgcatctcggaaccacctcgacgaggtcgtcatagcccatctgattgatgtttgtgtcttctcgtctttatccttccattatgaatcactgccctcaattcgaacctgatagtctcgttcgacggggcgtacctcggagtccctctgcccaaggaggaagtggaggatgagaacgctccctggcctcacaccgatcagtgcgtgtcggtccagcttcactttgatgtcacatcctgtcgcgacgacgttctcgaatttacacaagctgacgcggattcaactcgccctcccccttgtagatcacccaaacgtcccgaagcgttctgtatccagtcattgatgaacctcgtgagccagcttgtgtcgctttatcccgtgatcaagctcatcctcccctggctgcccacgactcagttgcctaacaccgaaaaggacggcggcctgtgggtgatgaagggctcatccagattgttccccgaattgatcaaggcatttggtctagaggacgtaagtaatgtctaacgccagcaacatttcctccatccgctgacaattgtgtgctgacatatcgtcgctctcgctcagaaatgcctcggcagggatcacttcaaatacaccgacgaacacgtagactggctgaaggcccatggagccgagatcgtccacccggaccttggaccgggtgatgtcgtcttttgggactctcgtaccgctcactggggagcagcacccgagcaaggtcgaccgaggatggccgtgtacacgtgttacaagccagccgagggcatctcgtccacccagctcgcgctcaagcaggaggcattcagaaaggggtacgtcactagtcacgatcccattacggggatctggaaggacaagagcgatactccagaaaacaagacgttcccctttggaaagcccgtattgagcgacgcgggcttgaaggcggcgggaatggtaccctactgaggatacggttcatatctgtaagaaatgtacgtgtgcatgtgtaccatatctattgtactcctgtacgagcgcaaataagtcgcaacatgaaatatgagtcctgctcgccggtcggtagacaagagagatcgatgcgagacattgtagggtatcaggttatgtctggtggagtaacgtatgaacatacaaggcaaagctcgtcgggacgggaacgaaagtgtgcatggcagtatagggtctcgagcgagggaagcaatccagcacacccacgttcagagaaaaggcgagcgcgtgtgcgcaacctcacagatcagctggcattgaaggcgcgctcgacactgtagcacggactggagcactcctgttcatatacacccttcatcatgactttcggtagtcggactgaagtgatcgtggcaatgtaatggtgtctattcttcacatacagatgtttcgtgacagcgttttgggtctagttcctcctcttttttatatcgagtcggttttgaatgtcttagcgaccttcgcagacacgcctcgcacgcccagtcccatggccagaatgagcgttacctcgatgataagcaaggtcgttcccgccagcatgaagcgcggcgcgaacactttccaaaccatcaagtgccgtctcaaccaggcggcgaagaacgcgctggtaaacgtgatcgatgtgtactgaaggatgaatgccagcatcgcctgtaaggtatcgacgataatggggctctggccccgaggtttgggcgagacgttccagagcgccagtagcggaactgccaaagcgagcatgatgtaaccgccatacgtgttcagcccaaccaggaatggcgacacggggtacacaaccgaatagactccgatgaacgccgatttccattgtatattggtaaaacttgcttggtgtccggttgcgaaaaagagaacgtggcccaaaagtgcgaacccagcagtctctctgaacttgggcggggggttggcagagctcatgagagttgattcgtcgaattgacccggagacccggtcgcaccaaatgcggccgacattgcttgcgcgtcccgcatggcgtccaaggcttgtagatggcatatcactgcaagaagacccaaaaccaggacgacttgccctgtaggcaagctaacgagaaagaggatcgcgaatccaagcgtcatgaaaagcagatagctagatccaaacgcgttggcaaatccgtagacgacgacctgaggagtattgtccgcttgtccttcgtgtggttcggtttggctgatgagtgacgccgcttgttcctcccttttaacctcgatgcacaatggcataccagtccaaacggctccgctagctcccagtatcaaaccgaaggccgcccgagcgatccacaccttgagtattttgatgaggggcagcctctcttggttcatcccttcccaatgctcggcatactccatgatccagtatagggcagcgagtgctagctcaacctggacgcccaagaggaatagcggcgccggtcccgaattggacttggactcgttcaacaccagtccaatgaccttgggcatgtaccatcccagcggcaggatcgccgccaatacgactgcaggggccatcggcgaggccgctccagcatagaaggtcatatgacaatacccgccttgctcttctcggcaaacggtactgatcgagatcagccgaaccagtaccgctgcagcgaaagagaaccccaagatccgtagacgtagtcggtgtgtcggggctgtcagcgctttgatcacaggaagtagcagtaccgagatggccatgaatgtcgacatgcggtcctcccagatgatgaaagagttggcagcgaaagaaatggagtagagcaacagcagtcctggagcgaccatctgcatcaactttggtctagagaggaacgacgccgttgtcttgcccatgaccggcagaccaatcgccaagatagtaacgagactgccgagcacccctgcagaccaagtccaagccaaagcctcgccgggtaccctggtccaaacacctcgtccagtaccgacgatgcttccaaagaatcccccgactttgatcgagacgaccaggacctcacggacgtagacatcccagctttcgcgagtgtttctgataccgatgtacagcgaccagatcgcaggaatgctcatcccaaacattgccagcccaagcaccatcgagcgcatcgagaactgcgcccagagccctcgaagcgtcttcaagctcaggtcgatgtaattcttctctgcctcgatggtccgagcccttgcttctcgcatgttgtccaaaaggtcctgatcgccataacctctctctggcttgcgtgagagcaattcttcaacgtccatccgtgcggtgatgacgttctcccacgcctcgtccagaaggtgctgatatgctttcagtgttgatcccgggtaactttcaaggtagatggcgatctggtcggcattcgcatgtgttgcctgatacaatgtctccagggaagtctcctccaggaaaaagtccggaatgacgcttccgaggttattgtatgggatgggggtacccagcaggagactaagggtcgggaccaagtcgatctggttggccttccgagtgcgaggcagacggccatcgctcaagagatgtccatatttttggtcgacgtcggctacagtgtcttctgcgatcgcagatctgagtggcttcgtcttggagtagatccaacctcctgcgctagtctcggacaacccgtcaccaccatggtcccccttttgatccatcccatgatcgccgagcaagacaagcaaggtgtcttcgtccagctcttcgatggtcttggcgaggaaatcgttcatctgctggagcttacgagacatgacgctggacgaaggtccaacccgatgtcccacgtggtcgactcctaagaagtgaaggatgagcacgtcccaattgttttcgaccgtcttgttctcgttggcgaggatggggaagaagttggcgatcacgccctcgtccacagagtgaaggtcttccacgttgaaactatcaaatccgtgaacgagatcccgtttccaatacttttccggcgttgaatggctgctacccttttcctcggcggcaaggggaaacagtccgagccaggtgtcgtcgcccaagacaccgacttccttccctgcggccttccattgcgagatcaagctatcctcaaggatctccgtactggcaaagttggatccggcatcgatgaaagtaggcaagcttcccgtagtcaaccccttgagtcgttgcatggtggtggttggaggatcagaatacagctcgaacagcatcgagtgcatcggcctgctggagctgagctccgccggtaggctcagctgattatggtaatatccgtcatacaccggcgattcagtgggtattttgtgaatgaagtccgacctcagggcatcgatgatcacgatgatggccttgtcgtgagtcgccggcaagggtgggaggactccgtcggcaccgtaagatggacttcgttgcagcgaggtaacacgggtcaagagaaatccacgggcaaaatgatagagcgccgtcaagtgaaagagaaagatgtatgccagtagcagaagcgctagagatgaccgggagagggtcgataataccgagcctgaactcttccttgtgactggcaaagctcgtgcgctctggggctgtttccaacggcaaaggtcaacatctggggcctgtctgggaagaactttgggatttaccgttttggtaacgggctctaccatggtcccctatgagccggtacggtgcaatgcagattttgcgagacggtatttatccttgtaaagatgaaaagtacactgcaatctgtgctcttctaatgatattcgtttggcaacctctcattctcggcaacagtcatacgcgaggtggaaataggaacgagagtagtacagtagtaataataaacggaaacatcatcgagaaatcgaggtggaaacatgacgtcgtgtcgtgctacatgtggcagatagaaatcgatacaggtcggggtacagtcgaacagatgtttgtaaggacttaggctttggcccagaacctcttctgatagctgattcggacccagacgacgagcaagaaagatacagtcgtggtcgcgccgaccaggtacatggcgggtcggtagggtttcgcgccttgatcggaccctccaaaggcatccaaaaggataccggcagtgatgggccccaggaagtactatgggaagatggatctgccgatgagctcacgttggttctgcacaagctcaaatattacgttgagaaactcacgccgaacgatgttgccaattcgatatatccgatgccctggttgatcttgtgtgttcccacgatctgggcaacaatgctcgactgaaggctgaaatatccaccagatcctagcccacaccaaaaggcgaatccgataatcccgcttgaattaaccgcgtacggccagacgaacaagtttgaaaggagaatggacaacagcgcaagtgcccatgatgtcaagttctggtttcgagtatcgaggcgtcagcccatgttgaccagccgagtctaggcctattgatgaacgtaccccagtcaaagtatcagccagcagaccgaagccaagccggccgattccagaagcaatgttgtatagtgcggagtaaagggctccttgtgaagcggacaagcctacagataccgcatattgcggcacatactaagaacgatttgatcagcaacagatccgatgagctgatctgatctgacaaactcacaaaggggggaataaagaaaggatacgagacgatgaagcaggccgccaaaaccctgatgaacatggattgtcgcagaatactgcgttccttaactcccgacggggaagagtttggtttcggcgccctgtaacctggacgcaacatccaggctgcgggctggtcaagtacgcaaaagagtcagatatattgcaagcagctgcataggatacctgctcgaactgacgaggcagaaaactagcgtggagagacctgccgatgtagggatgtcagaagatggtagagctcgctgcgctcgggacacaaacccatgatgcgataagtccaaggaaggccaaccttctcgattaatcgctcgatgatctagtgaattaacaatgagtccgaggccatatctcatgggaccagagcagctcacaattgaccagacggctcctcctacgcctcctccagctgacgtgatgccggtagcaaggccccgcttccggagaaaatattgggacggtaatgggtacgacgtctactccgataggacagcaaaattcttcagatagcacctaaagatagcatagttccacaacgactgaccatgaaaagagtaccagacgctaacccgaacatgatgccttgcaaaaagattagacctcccaagttccgcgtggtaaagcttgacaggatcaacgaggcaccagaagtgcaggccccgacgagtcctacgttccgaaccccgtaccacccaatcaaccaagatgcctgtcaaaagcaggcaacattaggctcgaatgcgacgctgcttgtcgatcgagcggcttacaggaatgcagaacccggcgaacaaaaacacctctagcccgccgacgatactgagcaaccgggagctggcaagcccgtcactcagaagagatgactgaatgaccccccaggaatatagaatgcccatgaaatggaaacatatgataaaagtacctgtgcgagaggctcacttcgtaagcaatccaggaataccgcggtacgcattcttatagctcacaaagcacgattgtccatccgaatcccccctcggcatactgagcttgctcgtcacctccggacacattcgtagagtcagggtcttccgccaccgatgtagggtacagctcgatatcctttttgagagcagaagactcccggttgagggacatgtcggtcgcgagaatttccatctcgtgggtttgcgagcgcatgccagtcacgggctccattttgttctgcgtcagctccaggggtatattgcccaattataatcagacgcccttgcgaattatgagttggaacctatcctcatctgatgggtgagaggaagtgaaggtagcctgatggatatgacggaattcttttgctggctgcagggtccagagcgggtggatgggtgaccctttgacttggtaatcggtcatccgcgaaatcaagcttagcgcgagagtttagccgccgcgatcaaaggtattcccgcatcgcattatcgtattgcaatccgcatggccagatggacttttcgaacgaacgcaaggagcgatccctggcattgaaatgatgataacaacacgacggacagctagaaatactgcagacaagccaaacaattgttcgccttggctgttgcctcgaggggctttctcggcggatgtacggatgtacgattccgtcatcatatgccaggacggaaagaaccagaatcttcaatattccgaatggccgatcgaagatcttgtgtgaaatgagtatgatccagctgttggagtggccgcctgtcgttttagtaccgtgttgtatagctatactaaggcgacctgcttaccaaatctaagaggcccacccgctcaaacgccttgatctgcttcgaacgaagatgcacaaagtacagttcgactccacggtccttgtatgacttgacaagctcaagtacgatttgtaacgcactgttcaataatttgagcctctggacaatcgaaatagaatatacgtcagacttacgaagagtcgatatcttctacgtcattcatatgaaacacaatagcgtgtgtttgatccctcttcggtgcctcagaaggatgcgaaacgtcggcaccatatagctcaagctgagcagccacaatgtaagtctcggatgtgtggaggtagagcgagtactacctcaagcaaggactcacgcggcgcaatcgttccttcagttgacccgtattcgcaaagttcaggttttcgcggatccgaatgacgagctgaattgtccagatgagtggacaagggctgctgtatgtcatatctgtggtgaactcactacaccagggagatcatcctcgatcgcatcaggattttcatccactggaatccattcatccgtctcgcgtactcgtcctataatcttgatcctgggtttagtggacttttggatgacgaggatcaaggaaaaggccacgcttgcaacgagcccaacctatcgagcagcagttgttcattgcggattcacgagataagcaggctctgggacctacctcaacgctgaacagcaaagtcaagaaaaacgtcatggtggcttgaagagcgtctgttttcgcccgcgaccgccagtagaaagcgacctcatggggaacctttcagagtaatccgataagactctggtcttggatcgtgcaattacgtgaagtctctactcacctcggcgagaatagaatagaccacctatgataagacgtcagcatacactgacgggagacttacactctcgcgatcgaacagcacttacgaccgtgacaatgctcgccaaaacggcctgatacgaaagccgaaagggccatgagtcgctgtggagtccaaagacgaggtttaaagctcaccttgggcagatagtggaaatattgcaggaggaaaagcgtcataatcgcaaagatggaggtgataatggacgacatttgggatctgccaccgatattggcattgagtctggaattatagtagtcgatgagtcacgagactctgctctgcaactttgaccgtacataccgactcctggtaatagatccgaacgctggtacacagcctgttcccgtgcaaaagctgacagcaaaattggatgcacctgtcgaaatgatctgtatgagcggcctgttaagtgctcatctacaaagccaatacacttacccaaggccacgagctcccgattcgccgagattggatacccaaatttggccgagttctcttttgctgccatgacggagtcgacgtacccgctacataaggaaaattggcgttaaacatggatgtttgtggtgagccccgggctcaagctcacatgacagcaatgactgcagcggtcggaaactgtaatgataaacaaaaggtcagcggagaaggaagatttacttcgggacactcctcaccgtctcgtgcgcgtatttccagaatttgggctggaatggcagaccaaatggtatcccagagccagcttctagctttccaagcacgacaattcctttgaggtcgagcttgtacatgtccgtaacgactagaggggggtgccagtcgtcagcatccgtaccgtccgcagagctcaacccggtactcacttgttgacacaacgaccaagatgaaaatctccgggatatatttgagggcaggaattcgccctcgtagatgctgtttgaatagccgagcaccgatcaaccacgtcaaggacaccagactgagtcctgcagtccagatattggtgttcccaatgtagctgaggattaaaatgagcttttcaaatggcgagattgtgtttccgtgaacgtattgagccaagcccagcatagggaccatctatacgtcacccaaagtcagacccggcggactatgcgtgtgctcagcagcgactcgcctgctcgatgaaaatgatgattccctatggcccaagccaagtgtaagagatgagcatcaagccgtctgttcaaactcttgcaacgtctccctcacgattgctgtaatgaaacctctcaacaaagctctcgacaagacgacatccaggaaacccatccggaaaatgccaagaaagaaggtgatcatcccgacctgcatacaactttcgtcaattcagagcgggaaagagaaataaaagagccgatcttggacttacctgcatagcagtaacaccagcgatagccattgcgacctgttctggatgctttggtgcgtgatgcggatcggcctctagggcgtctgtgatcagctgtcccactagtaaagacagagcggcttcgggtccaaccgatagctgcctatgatacggcgaagagatcacgaaaagggtgagaatagcggtcttgatgatatgtttcgtcggactgaccggcatgttcccaaaagactgtacactagccctggaatgataacggaatagattcctgctactggattcagtttggccagtccgctagcatacgacatcgcctttgaaaccccagtttaatcagccgatgagcgaatcagaagattccattgagtattacctggggaatgattaagcaggccacctgttcacaaagacggtctattaggatgtgccaacgatatagctttgataacgtgagcagatcctacgcacactcatgcccgccgtaaagtccccaccgaatgtcgaccattcatactctggaagccatgatgtaacctgtacaagttggtagcattagaggccgctatagatggcatacgactcctaagggagatattcactggcacatagtactttgttcgctgcttgactctggccggcagagatttgtgcgtcttcggagctgcagtccccaggcgggaggtcagaaaaatcatgtcctcgcagctccgattgtctggctgtaggagcgaagccgcacgacactcaccgaaagagtcacccatcggagaagcccgtcctgattccatatccaggaaagggctatcggtcctaggtctcgactgggtatccctatctcttgtctggtccttgtccgcttcgtcagtttggcccctttcggatgtggtatcgtcgagcatctgttcgctatctaattgatgcacgagcgttccccatcccggtatgtgcttcgccgcagcggaagttcccagtagagggcttgtctcgctatggcgactctctggcctacgaggtttgggtagactcgtagtgatgggcgtgttcgatcctgggagcggttgtttggtgggaagagccatggtcggggtggtgatgatcgagcggcttgccgaaaacggcgatgtcaaggggtatatatttcctcagcgttcgtgcctcatggagctgcatgaatgtcgaacgatgacaatcctgattaatcctgctattgagatacaaagggacgatgtcgacggcaagatacgtcttgagtcaaagccgagccgttcaagttgcagcctgacccgggggcgatggacgtgaatcctccttacagatcgaatgtcggcgatcatgcggccggtcaatcgcggtaatccagcttgcccggaatcgcgcaggagatgtaggcacagcttttgatccctcaaagttcagggctgacgtggcaagatttttatcatcgtctccaaatctccaggatatctcacatgctcctgcttgcgctgctcaataaacctcaatgaactcgagatgctcggaaacaacagatgcgagaaatgctatgtcaaaagataaaatatcaaaaagatacctgagcggatcttccccccatcgctttatgatgcctaaaccacttacgccttgagaggtggaattacaagaccataccggccatggagtagctttcactgacgacccgaaccgtcggaacaaccgcagctagtgcccactgccaagctgttccaatcgcatcgtttttgtgatgtacaccaggttactcgcggattaatgagatatgacgacttatggtccggcttggcgacaacaagttgaatagccacccaaaaagattactttggttacaggtcccgacgtcggaagtaaatgggcttcgcctcgtttgtcgtcgaggtcattccaagagttggtcaggaaccaattcaaagcaagatgtaagatgatgatgtttccgcgggcgacaatgacaggtgcccaaagcggcgttgctatagcatcgtgaataggctatggatcagggcctgaccatcgagcagcttcatttggttttccggattgaaatcctgcgatgcgactgtagcagattggacgaagtgattggcgttattataatagttcacattctgattgatacagcatgtctattggttctctactcgtttctgactcttgttcacgttcctgcaactctctttcttggtcccttaatcgcggctcatgtcgttcatcgccctccaccacaattgcgtttcctcacccggcggttccatcgtcctgaaactagaaccatcttccacgctgcgtctgccagaagagctgagactgcgtaatggcgacagattctcgccttgctgcgaacttggtactacttcgttgtcaccctctccagcttccaggtcttccagactgtaaatacgagcttcgtgtgcggggtttgaacatggttcagactggagaggctcgattctaggccgagggccgggcaccaaagccaatgctggctgttctgtacttgccagggcttgctccttttcccgctgttcttgtgccatcttccttccttggcctctcaacctcggatctgtgggcggcaggggcacgtggctcatccgccaatcgaccctcatcacgatgctaggctctatcggtatatttgaagggtcatcagtgcggatatctccatcatccacatcggtcatgtccgggtcgacgtcttcttcgtcctcgaaagcgcggtcgaaatcgagcagggcacgctctggatccttcttcttgcgctgtttggaatatccaaaagcgtgcagcgaagtctgcgctttccgctcatcgtgctttttgcctctcaagttcgatggtctgcggaccgaactagatgggacggcgtcttcgtcatgctgtacgcctgaccaggcgttcgcgactgaatcaaaaggtcggggagttgtttgcttgtcggtactgcgagatgtggcgtctgcttgaatggtcatcgggttgtgtggatccaaaagcggcgcgtgtcgaatagcagggactgcgtgatttatcgccttgggcgtgacaatggggtcctcaagaacgccctgctgaaatgaagttgactgtttagacctgctgaaacacgcgagccatcatgttacggaccttatcctgtgcgtttccgccttcttcagatagtttcgcgcgcttcttttgaagaatgggatgaggggcagattgcaatagatgaaaacttggaccgctattctggaatgttccaggaatctactgagggattcttgttggttggtatagccttaggggtctcgaaaatcaagttcgagcttaccgtatcatcctcgctactggctagttttcttttgcgtttctccaacatctcggcctcaaggctatgtctgccttcagcaccagctgatcgcgccgtggaatcggaggacggttcgtttccaagcactggtatatcgctgacagtatttcgcggagacgagcttgtcttcttacctgtcggccccgcggcaagcggagacgacggctccttgtgcagcgtgtcttcgaacgcttgacgaagagaggtcccaccaccaaccggctgggtcagggcgtagaaggactcgaattttgccggtgaccacgttgctaatgtctcggtgttatcgacccattcttcctgtctagcagtaggggtacgacccatagatcgtgggcttcgccatgaagctcgtgttggggtaagtttactcggtgtcacgggcgactgcggcgatcgagcgatagatttcctcgttgatgctggtccgattggcgttcgaggttgaccgagaatgggcaccgtgaaacccaggtcccgcagtggttcgcgatgtggggttcgcaaaatctgcaccgctttaatcgcgggacgaggtggtgtttgaggcgtttgttccctgagcatagtggcatcagatggccttggaggcgtcatcactaatctgggcgtttctgatggcgtgaagcgtttagacgattgatttaagcaagacttgctttccggctcgatcaacggttgcaactgaccttcaagcttgcccggcgtgaccggtggatctgcgagaggacagtaagacgaggtagtagtgtcgtttcgaagagatacgggttgtcctgctccctggtcgagttccctggctcggctgaaaaggctcggttctatgacatgtgaccaagattgaggaatggttgagccatcgagatgcgccgggatgggttcggcaaaagcgtcttcatccatgtccatctcaagagtagctggcatggtttcatcggcgttgatgggcgcgctcccgaacgccatctcaagatcatccacagtagggtagaactctgcacttgacatcgtctcccgctgtgcgaccccgtcgtaaccatcctcaatgccggcgtgacccggcccgctctcgtcctgactttcgatcctgatcacgcgcttggtaggtcttctcggcgtgatctcgtcgtcttcatctctgacaacggagccaatcttcttctggactgcgggaaatctaagttcatcaggaagctggacttccagtgcgtctggtccttcctcttcatagtcagatggcagcggtgtgagatcgctgctcaattccagttcgcaagtagcactcgtgtggctcgagccaccagatatggtcctgcccaagcggatcttttcggtggctgatcttgcagcatccgccaaattaggagcatcttcagatacgagttgctctgtttctgcatcgagtccctccgtagctaagcgagaggcgccctgctggggcacctcggtcgacttcgtcctagatttagactgggcgaagtttgtggcgcgcagactttcgacctcgtcagcagaccattcctcgtcctcggcaccatcatgatgcacagccatcgctcgtaacccactcctgaccgacatccggtcaccgatcggcactctcctgcctctcatcggtttgcctacgaatgctgccggacgataactctcgtcatcctcggcagtgccgctagatctattgatatgccttttggcggctaagagctgaaggtgttcgcgataagcgagcgaatggacctcatcgtcgctttcagctcgcttggacgagtctgatgaggcttcctggtgcatctttgtttcgacaacaggttcaactcgactcggatgagccggcttcagctgaggaaccatgctttcgtcgaatacttcgatcggatgatcgacatcttctcccgtatccgatctagacctgcaagacctctccgctacttcctgggcgttacggacaggcactttattccacagatcctcatcgaattgggaatccgggacgatatcttgagtttctacgctaagggagacccgtcgggcgccctctctatcctcaataatggtgtgtctcctcctcttcgtcctctttcccgttgaaacagttgtgtcatcagctagaatcgctgcaggcccacgcccggactcctcgttcttctttgccacgcgtttaggctccggtttttccgctttcgctagagcgctgaggggtttcagaaatttagacattttcgtctgcacaacgggtccttgacttgtccgggcgggcctggaagtggaggatgctgggcctgatctgaacctcgaacccgaagcagctgcgttcctgtgacccatgaacgttatcgattcctgaatctcttccggtattccagcttcaagatctaattcttcgcgctgtgtggaactttgtaaggcaggtcgcttctgccgcctgggacgattcaggctaaagacgtcttcctcaggatcctgctcttcctcctgactgtctgcaaccgtttccgggaagccttctccgagttcggtatttccttcaacgccaggcccgaccatctggctgagagttgctcggcctttgcccttgtccttgactcttaagctgaacatgccatcgagttcgtcttcgtcaggcggcgtgaacggctgtctagtcgccccgatgggcgtgtctcccgctttaggtctactgataagctcgactacgccagccttcccttttccgcgttgaatcagaggactattgcgttgaacggtgtagccagtgcgtcccaactgccaagctccttgaccattttctgtgggtttagcgtcttttacggctccgcctcctgaagatttccgactgctcttgaacgggtacttctgagggctaagatgcagctgtctcagtcctcgcttcgaaagacccgtagtcggtggagttgatcctgccgtcggcttctcggtcgtgatccaaccgttcatgatctggttggtatgtgtcgatagcggcttgggctgtttaaaccctgggacaacccgccgagcagggttgggcgtggcaaagctgtcctcttcactgctagtactcattgtagttggacagtagtcccaagcatcgattgcttaggcctttggggtgaacgtggtcgaaaatgctgggcaaaggtggtccgacctcaggtcattgcgagatcgaggcagaaccgatgctgtgccgaagggtcagcagattgagctgccgatggctagggttccgagctacgtcccgggcaactcgaagtcaaagatacgagtatgccacagctctgggttccaacaggcggacgggacgacttttggtgatggcaaatgatcctcttagctcaaacctgctcatcaccatctcgcatctcgttgtcgtcccggtcatcatctcccgatctcgctcgacaagcaaatcggctcgacgcgtcaacgactgaccgaggcgcgacgcgtttcggccatcaatcaaccgattcaaaaccgttcaggcatcttgaaggcctgttgcggtgttttgcaaagctctgcataggaatccgtaacagatgacaactatccaatggcttgccgccttcgcgacatctataacgagagacgctctgcgaacatgttgactatcgccacggcccctcctcgtgatcttcttgccacagacctccccctccgccttcatcatccgtcaattccccctcgtcttcatctccaatgacgacattgctgtatcgatctccatcagtggcgtcagcttcctgtcgtttacggctcagcgcaatcggatgtaaagggaaacgccagccggtcgttgatggaggataccggaagggtaacagtagggtatgatgtggtctgtgatgcaaagagccaatcagatacctagccgttgagcagtattcagcggggcttacaatcgacccgttccaacgttaaagtaatgttccagattctcgcgacgtgatcccaaatcgtaagggttaatgtatgtctgagctccttttacatgagctaccgattcccgtcgacttggaaaggatactgagagactcacgacgccccgctctttggccttttttgtgaagtagtcgttgtcgtgcccttcaatgctggtttctccccttgagatcaggtagatatgccagactagtagcatggggaccgcgcatcctgagatagataaaccgtcggcagtcagtaaatacagaccaagcggaacgcaatggcctgtaggcgagatcccgctcacctagagctacgctgaggacccatatcaatgtgaaaaggatcggcggagttacggctacccactgacgagatgatcggtgatgggggatgtcagcgagccgccgtgacacagtaagtcggtacgtagctctgagaaaggggactgaccgctggtttatatgccatgctcagccagaagtcctggtaccccaaaatggcaaacgtccagcaagaaagggacagccatcccctatcgtaatgcacgccaaggaaacactaagatcagtcacctccatttcagcaatgtagccaggcaagggcttacatgaagaggacgaagtagcgttggttgtacagcccgacctattgacggaccaaaactacgggtcagcaaaggtaacggtctcagtgttagagaaggtaggggcaggactgtacacattggttgatcccttttctggcgaaaagacagctgaataagcaattacccctgtgattgaggaacccatagcctgagcggtgacctacaaggacaatgatgatccatgacaaggacgcagcttcggcaaacacgacaatgatgcgtccgctgcgcagagcttgtaagttaaaagaaaaggcttatgtaaacactcccccgtcgtttctatactcacaataggctttggtcccaagcatctgccgcatttccgtagcttttcacccgcccacgtcctatccgccaacagccctcgagattcccgctccgatccgtccctctcgaccatccatggagcttccctcttgatctcctcgaccaccgcatgagggttaccgggcggtactcttgtggcgtagtagtattgagaatataggttgaccatgatcaaaatggcgatcggaagaaatgccagccgtacgaaggtgactggtttgtgatagagaatgacatcgactggcatacagccgcacaacaaaaagtgcagcaagatgagcgactgggccgagtgaaaaggatgacaagatcctcaccaaagctaatgcctcctagtacaattaaaacccagcagatagttacgaacaccgggcccgcagctccggtgagcctatccgcacagttctcgacgctcttgaaacatcggatcacgagcgtgcccgaattccgtattagcggcatgttccgtggcgagcagcagcgaagtggtttatagagcccgaaggctaaaggctaagagaacgtattcccaatctcttcgatatcagaggtggctatcgctccttgcatccggactagctgaactacagtggccagatcctacatcgagacgaacatcgaactgccccttcctgtgccgagattcgggggttcggccggcggttgtttacaaaggggcgaaagcaagggcgacgcggatatgtgacgagtctagctctcgtttcaagacgtcttgcgagacgctacacgcattcaagctgagacagggagtggtcgggcatcagcttggtttgtcaacggtccattgtcttgaaagtctatggctgtgcgcgaaaactgatttgagcatgaacttatgcgagaaacttcgaataccggaccgagtgctgacatctagcgaatttgacgatacatacagctgtcggcgtttcaagttaacttgagcatcgaggcctcctatgtaccaaaaagtgacataatgagacgatttattcacgactgaatacaggtgttagctggtaactgcgagtgccttgtgcgatcgacgagcgaggtccggacgtcagagatcagtgggatcagagttgagccgcctgcccaaagtcgcgtctatttagcgacacgcgacgcgtcggtatcggcgagaggggggcggacatgaacgtttgagcgtgttgaattcggtccacaaataacaacatgtccgcgacttcgcccttgaacccccttgagcgcccccgatgcacacaatcccgcatgcaattacatcgctaaccgtgcttgtcaactcctactaatctcgcaccgaatcctagtaatcaaatagcacaatctcgactctggacgaggtcgattcggtgtttcactccaacttgtcgccaagatgtcgaattccgaggaagacaagctctcagacattctgcccgacgtctctagccggggtgtgtccttgaccgactcgagagctgtaagtcgatcgttcgaagatgaagcccatcaccacagtctgtcctggcatccctagaacgcagacggattggggttgtaggtcacaatactcatcaagctcttgccgcgctcgatcaccatcaggtcacccctcagccgagaaaccgatcacatcttcgcaaggagatccaaaatgagaacgacgacgacgtggcttctgaagctggagatatcgacactgacgaggaagagcgcgaggagaagcaagtggatgcgatgagcgtcgacgaggacgacgaggtgagtctgccactcgtccaaccgagttgagccgtctgcggataggccgagaaagaatgaaagctgattcatgctgcacctcaatcaatcttcacaatttggctactttgaccaccttatcgcaatatgcatcctttttggaaacaaccgcacggtgcaatgacccgttttctcagggcgcgactacgtcgaagcatctggccacgccgagtaagcgtcagcagcaagaagaacgccgagctcagaaccgagctttggagggaaagaagggaaagttggagaagatcaaggcaagtgcggctttcggtctcactcgactgccacactcacctgatttttactttgcgcgatgcagttggcagactcaatgaagcggttctcttatcttatgggccagaccgagcttttcgagcatttcttggagattaaggtcggtccggttgggcgagactgcgtgtagaaccatactgattcggaactacggcttatcacgaacgccttacagaaagagcgtgatcccgaattcgccaggatgatcgaagagcaacaggccaaaaaggatgccaagggcaagaaaaaggccgcgtgagtggttaatcgcacaactccgtggacgccggcgatttgaacttctccaattacttgttctatagcggaacaaggcatcgcaagtctgaaaaggaggaagacgaggagcttatcaaacacgacgatgacgacgaagacgagggggtctatgtgtacgatgagagtccagcgtgtgagtactggtcgcctcgttagtccgaggaaacggcggtactgagactgctacctatgatactagtcgtcaaaggaggaaagatgcgagattaccaggttgctggattgaactggatggcttcgctgcatcataacggtattaacggtatcttggccgacgagatggtacgtctatttgcgcctcatccgcataattaatgggcaggatgtaacgtcgcttcaacgcaccaatagggtctcggaaagacactgcaaacgattgcctttttggggcatctcaaattccgctgcgataccacaggaccgcacctgatcgtagtgccgaagtcgaccttgaacaactgggatcgagaagtggccaagtgggttccaggattcaacacgatcgttctgcagggagccaaggaggacagggtgagtgtcatcggattcagaaccgcgctctacatattagctgactcgaatactgtcttgtctgtccgctaggctgtgatgatcaaggagcgaattctaacatctgatttcgacgtcctcatcacgtcgtatgagatgtgtcttcgagagaaatccgtcttgcaacgatacgcttgggaatacattatcatcgacgaagcgcaccgaatcaagaacgttgactcgctcttgagtcagatcgtcaggagtttctccagtcgaggtcgtctcttgatcactggtaccccattgcaaaacaatttgcaggagctttgggccctgctgaacttcattctgcccggtatgtcgccggtctgcctcggctttcaatttccacgtggctgatcggcagctccctcgtagatgtattttcttccagcgacgatttcgacgcttggttcaaaggcaagggcgaatcagacgaacagcagcaacaggtcgtctctcagttgcataaagttctacgacccttcttgctgcgtcgagtcaaggccgaagtcgagcattcgttgctgcccaagaaggaggtcaacctgtatgttggtatgtcggacatgcaaaaaaagtggtacaagagcttgttggagaaggacatcgatgcggtaaacggtaagtctatcccgttgcctatcgtcttcagcttcgttgctctggcttaggctcgatgtcataggtgccgccggcaagaaggagggcaagacccggctgctgaacattgtcatgcaattgcgaaaatgctgcaaccacccttatcgtgagtcaaagtaggccttcttacaacgttcaatcaagactaatggaatttgactatagtctttgatggagctgttcgtttctgcggatcttagttttctgttttcaacaacgagatcgctgatcgtgaccgcgttcataggaacccggaccaccttacaccaccgacgaacacttagtcgacaactctgacaagatgaggattcttgaccgactgctcaaaaggatgcgtgagaaaggctcgcgggttctgatcttctcacaaatgagtcgtgtccttgatattttggaggactattgtcaattccgaggatacagtaagttgcgcctatggctacttcgtctcgtgcatgggctgactgctctgcctggcagagtactgtcggatcgatggaggtaccgaccatgatactcgaacggcttcaattgatgaatacaacaagccagggagcgaaaagttcatcttccttctaacgactcgagccggaggtctgggcatcaacttggtcagcgccgatattgtcgtcctgttcgacagcgattggtaagtagttgcttggcacttgtcctctccacccgaacagccgccttatgctgtcgtgcaacaggaatcctcaagccgacttgcaggccatggatcgtgcccatcgaattggacagactaagcaagtatatgtctaccgattcattacaaaggtgagttatcggggactctttgttaatccagcgaattgtctaactccgcccggttccaggacgcgattgaggagcgaatcattgagcgagccatgcagaagctgaaacttgaccagatggtcattcaagccggtcgagctcagcctgctgcaaaaggtgatcaggttgtgggccacgtatatgtcgaccggtgctgacttcgatcaacagccgcccaaaacaaggaggacctgctggacatgatccaacatggagcgggcaagattatcggatcaaaggagaggtacataagatatagcgtctgctgcatagttgcgataataccgatactgagctggcttgggctgatagtctgacggtcgatgacgatatcgagaagattattcgggaaggagaggaaaggaccgctcagctgaacaagaagtacgagggcatgaacttggatgctctcaccaacttccagcctgagctggacactcggagctgggagggccagacctataccggtttcaaggtcggtagctcatgcgatgtgttcattgcactgctatgcacactaatcttcgtggggaacatacagtctggcggacctggttggatcgacctgggtaaacgacaggcgaaggaagtcagctatgctgtcgatcagtacttttcgaatgctatgaagggcaatcaggctcctaaggacgacaagccgaaaatcccgaaagctcccaagcagattgatctgtgagttgtcccttttgtccttccaccgatttcacaggctgagaagcacttccagtcaaccgcatcagttctttccgcctcgcttggctgaactccaggagagggagatgaacgcttggagggtaagttccacacacttctggacgtaatttgagattgatgtctggctcattaccgacccgcgatccgttatgcagaaggagaacaacctgccagcagaaaagccggaaactaaaggtgaagagctgtcagaagaagccttggacaagatgaaagaggaagcgcaggctttgatcgacgctggtcagtttgacggatctcgcaacagtacggtgattagcgtattgatttgttatcattatgcctgcagcggaacctttgacggaagaggagcgggaagaaaaggcaactcttgtggagcaggtcttcacaaactggaacaaacccgaattgcgaaaattccttgagctctcaggaaggtacggccgaacagcacatgcggcgatcgcggccgagatggacaacaaaacggaggaggacgttgaggcatacgccgaagtgtactggaagcgatataaggagattccaggtgggtcggtccttgaagtgcactgtagactccctgttctgatataccttttgctactccaggctgggaaggatacatgcgaaagtatgatgacgaggaaaagcgacgtgagaaacttcagcaggacaaggatttgctttccgccaagatcagcggtgctaggttccctatgcagaagctcgacatcagctacggtcagaacaaggggaagcactacagcgaggatgaggaccgattcctgctagtcaggttgaatcactacggactcgagcgtgattatgcatacgacatgatgaagagggatatcggcgagtggcccgacttccggtaagctgccacatctgtatcagctgcatgtggttgcattctgatgacggattgacacatagcttcaactggtttatcaaatcgagaacaccggaggagctcaagaggcggtgtgcgcagctcctgacgtgtctgcacaaggatgtcgatgtcaagcccgatggcaaagcaccggcacctaaggtcagtccacgccgtatcttctggtccctctggagagaatactaaacttatctgttgcacgacacagcgacgcaaagtagaagacactgtgatcgtttcgcgcgacggaacgcccgcctccaacagtggcaagggggccaagaagcgaaagtagagcgggaagcgatacagagaggaccgaattcgtaacgacagatatccatgagaccctttgtacatgtacgatgtatatctacattaatctatttggcggattcttaggagatcgataccgggcaaaaacgcgctgatcttgacgacatatcgcacccgccacccggtcttcttcgccgttagcattctcgatatgttctccttggcgtgaatggacaatctcatcgtgctaccggacacagcggccggggccgcagacgagctaaactgcaaatgggtgcgaccagaaaaagcagttagcggggagtggctaagcaagaggagttgcgggcttcattggcaaatacgcatcggcaaatctacgcaatattgtcgagtttcaccttggccgcccttttcctttgagagcgagcttgctgcgtgagaaacaaacgcccctcggcccgctcggcatgatccgggatgaacagcctcgcgcttggaagaaccggagaacaaagagtcgaacatgaccttcctttgagatgatcgacaagccgatacggcaaacataaaaagtttgcaactccgatgagatcgtcttcattgtagctcgaaccggtggagtcgagctctcggccaggatgcaagggaggactttgaagcactcctggtcgcacgggcgttgatctcaatatcacacccgtcgtagctttcagcctgtgtgattcagtacagcgataggcaacgatctcgctttaccctacataccagcgacctatttcacagcaatccacgctaagaccagcccatgcaagcctggattcgactccaatcgattttggttttcggcctacttttttccaatggtatcggcgtcgaagctgggactcgtggtagaagctttcgaagtccggaatgggtattgcaacagtcctactccggtcccagcttcttcgagtgagcggctccttctatgacgctcttctgatattatgtgttataaccgtgaacaagcatagtgattgggaattctggtccgacaaggatccaacgaacggaatcgtagactatcagacggtagatcagagctgggacaaaggactgatctatatggacgaccaaagtcgagtgagtcgattacagttggcacgattcccttcgacacctgaactgatcgatcgtttcgtgatggtccgcgtaggttatgatacgagcggatagcgtgagtgaaaggcggttactgacaggtattgtcgctccgatcttcttgatggtcttcctctcttacagtggtcagatttaggcttcaacgaaccacgtgcttccgtccggatacactcgaaacgactcctctctcttccatccttgaccatcctcgacttggaccatattccgacaggatgttctatctggccagcttattggtattgcggtccgaattggcctaacggcggggaagtcgatatcgtagagggagtcaacggggcagaaagaaatcagatgacgcttcacaccggcgaaggtgagccgtcgccattgccatcggatctaccggaaagcgagcggaatcctagctgagaagggcaagatctacgaacaggctgtagattgacgagcccaggggtattctcgggccagacactggtgagttcacaggtatttgagattgggcgtcactgatatccggagatgcagggaaccgattgccaatccgccccaggtaaaaacgacggctgcggaattctctccgcttcggatcggaccacagggagaggctttaacgaggatggcgggggagtttgcgtcacggcctgggtcgacggtgggatcagtgtatgtatgtttcgacttgtaaggaatctgggacgagattcgcgagccaaagttgatgagacaaatgttcagggatctttaagcgatgggacactccggaggatgtctgggatcgtaaacggaaccctgatcctgatagctggcgattaccggacgcacgattcgctgcgagtgcatgtgacccattcagttagtcgttgcttagtactcgaagtaccgattggtggcggatgcggactcatatccatcccacaggacacttcactgagatgcagatgatttttggtcagtctcgattgctgatagttgagcttgattgtgcactgatcggaactcgcgcctggaatatcatatcacctcatgtctaatagatattacagtgagtgctatgtcgatcgaaggagtcatacatagcatcgtggcagatcagctcatcggggatcaacagttctgcggagactgggcagggtcacctggtgcatgggccagctccagctgtcccggaacatgtgcagatacagtcatgaccggatccaagtaagcatgatgagtcccgataatatgattacttttcttataacctgatcacgctttcgaccggaacagcttcaaagaggcatattttgcgatcaacgatcttcgagtctacactccacctggcacaggtcaaccgatgaacgggacgcctacttttggagagccttggggtgatcgggatgagggtggaagcggtgtggtgagctggatcgggtcttctagtcccgtgaggctacctgatcaaaggggatcgacgttgcgtgcggtcgtggccatcgctgtggccgtgagcgtggtcgtaatcgtcacaagtaactgaaacatcggggtagtccgcgtggatgtaatcgattcagatgttctttcttacgacatcgccgaggctcgcttattccccctctcctcccgcctcgggcagtactctgtaaatctcgtaactgcctttcactcgtctaagcatccttccgcaggtcgctctgattgatcgctctcttggcgacgtcaaaggctcgaaacgtcgacgacggacgaccatcaaaacactacaacttgctacaagatacaatgttcatgcgtaccagggctccacatcccgcacagctctgctctcttgatacgacgatctaacgaaacgtataacgaaggtattctccaggtagatcgaagctcgatcgctcgaggcaagtctcagctccaaggctttctcgcatccgcatcaccaatttacctttgtcctaacatggctctcatttctgcggttcggtcgtctctctgtagggttggacatcgacacgatcgtgatatcgagccagacagtgctcactcccaggaatcgtttgttgtcatgcccatttcaccactgcggagcagcatagtcgaccgttccacaccccgtcatcgacacaccggatcaaaagacatcacggaagatcccttttctgaccagtttcctcctcgaacgtcacgacttcgcaacgaccacgcctatacgcacgaacttcaatataatgggtccttcaacgccaaggctggaccaagctccccgagtctcacgagctcccctaaatcagacgtctttacctatgcgagcgtggaatacctcggaccatcgcctatcgccaacacttacccacccccttcggctttcggtctgacagaggagaactcgcaccaaattccactaccgcgagctcggcccaggttctcggagtccaacgcaaacgctcggaaatcatggtatcacagcatcgttggctcgccacaagctcggacaagtcgatttagcatctataacccctttggattcggtggagcaggaggagcggctaggcagtcctttttccacggggatgatggggaggtcggaggtaccagggcggtaccagggcatttctctaggaacgcctccgagaggggaaggttgcagggtttgatgcaatgggcgcagacaccgacgaggctgaggctgggagatggcgactctgaaatcttacaagagacggactggatcgggcagaatttgagacggctgaggatctggatggtgaacgatggtgagtgatttagctctgacaattcaacgagacgacgcgtcttgctgatcaccgaatgtcggttctccgaccatgacatctcgacaggctcgagatcaatcttctacggcgtctggatcctgtcccaggtattactctttgcttttgccgtcctccattacgcgctcaaggacaatctgagcgctgctcgagcggttttcggaagtagctacggtacgtcgataccaagcgagctccttaagaccgcaaatcggctgaccctgtttccctattcgagcgtctctacagtctgttctcgatccgcggcgatggtcctggatgtggatttggcgttcattctgcttcccatctgccgcaactttataagtctcctccgaaggactccgctgggcgaagtcatcccgtgagtcatgcaacttgtggaaaatccgaatgattcgatcaagtcaagtaatgaattcctacccgcgatcagcttcgataagaatatctcgtttcacaagcagatcgggtactccatctgggcatggtcgatcagtgagcttcgatctaaaatcaatcggcactgtcctttcccgaggctaacgtccttatggggaactcttcgccgtagttcatactgtcagtaacagcttattcggctgtctcatgtcgagcgctccatctgattcgttccggtctctacgcccgcaagatttctcatgaagtgaacttttacaaattgacaaaagctcgtggaacgtcagtatctcgctgtccttgtgattgaacacctgtgctgatttttttctgcgtatatagcggagtcaaaggtttcttcatcgccaacttttggacaggcccagggtacgtctaatgcgaggacgcaagggcaaattcgagctgatcttaccgcaacctggcacttaggcttaccggctggattatgatggcctgcttgtggctgatggtctggttcgcgatggaaaaaaggaaacgtgccaattttgaaaggttctggtatacccatcatgtacgttcctgtctagaagatgtgtccgaagtctccgtatccaggctgatttgctgctgccctgtaaagctctttgtggtgtttttcctttgctggcagctacacggaatgtactgtgaatttcgtttgacttgccctcgttctcggactgagctgatttcggtggtacacgtaggcatgatcaagcccgatcgcacggagcactgcaaagcttccatgtatgcggtcttttgggtatgccacgtgatggctcaactacgtgcaaagtagctagtactgaaggtgttccataaatatcgcagaaatactggctacctggaggcctccttttcatcgctgagcgtatattgcgagaggttcgagcgaatcacaagaccactatcagtaaggtcgttcagcacccatccaacgtcatggaggtacaaatacgcaaggagcatgccaccgtcagggcggggcagtacatcttcatcaattgcccggagattagctattggcaatatcgtaagcactctcgtctccaattagcgagacgcagcaaatcctgatcaccaagaccatttcagaccctttcactctgacatcgtgagcctaacgattgatgtctcggcaaggccctcgctgtattgatatgacgatctcttccgcagcgcaccagaggaagactacttgtcatgccacatccgtgtcgaaggagattggactacagctttcgctagagccctcggatgcgactttcagaaaaaaggggacgataagggaaaatcgaaagacaacgccaacgatgtaggaaagagcaaggaagctgtgacagtcgaaacaccattgaaccggtatcttcctcgggtcatgattgacggcccgttcggaagcgcttcggaagactttaacaagtttgagactgtgcttttggttggaggcaagtcgacggcaaccgtgattgatctgtctgcccttccctgaccaaaacgtcaattctactagccggtatcggagtgacgcctttcgcttctatcctcaagtcgatttggtaccgtatgaatgactttggccgcggcgagaagacccgcttgagcaaagtctatttcatctgggttattcgagactttggatcggccgaatggttccacagtttactcgaagcgatcgaggccgaggacacggaccagcgtatcgaaatacatatctacctcaccgccaaaatcaccgaagaccaaatgaataacatcttggtaagtcttgtccgtctgactgcattacatgtagcatcccttgaacaccgccatcactcagctccaggatgtgggagcagacaaggacgctattacctcgctgcggtcgcctacccacttcggcaggcccaatgtaagtcaaatttactgatcgcatcggattgctggacatagtctgacgaaagaccgctttgttctgtagtgggaccgggtcttcgaaagcgtggcgagcaaacatcccgatacagactgtggtgtcttgtgagcatgacatgcgacttcggctcacgttcgccggcgggattgacataaatttggctcttgttgcagcttctgtggaccaccggtcctttccaagcagctacatctgatgtcaaacaagcatacgacaccggagggttgtcgctttttctatgggaaggagaacttctgatattatattataatatctgcacatggtccatatactcccaaggggttttctgtctgatgtggcgaggtagtgcctggataaacccctcgtgaagaatgcgaggaatgccattgtgcaggagctggtgatcgacgatccgaactctcctgtcgaagactccttgctcgagaagatctctatatctgttcatcaagcgatcatctcttgccctgtccatctcccatgccaacgcctcgtccagcatgctcgagacctgctccgaggccggacgatcccgcttcgcctggattccccaacgcaccgatctgggctgcagcctttgcttgtggatccggagtggcaatgttgttcatcactgctctctcagattcggcaactcgttcttgccctggcgtcagcgtgcgatcgtgtcagcgatttgtgatgccccgtggaagatggtcgaattacatacaggtcttgatctccaatggtctctcaccgttctcggtggcgatgcgacggcgctcatcgatggaaggtttggccatcccgtaggctatagctgccccagcgatgagaactccccatccgtaaacctagtggaggagcagtgagaatccgagatgtcccgcttgcaacattagacgtcgggctgaagagctcaccaccgatgctctcgtgttcatgtcggcgtgttgagtattcgaggatggcaggtttcagcgagggcagcaagggatggtttccgttaagatgtcttctctcagacttctttgcagaatgacgacgatgtggacggtgtctgacggcagaatcaggcgttaagaggttgagtcaatcggataatgaggaaataaggatgctagtccaaccgcgttcgtcatatcggatggcgacgaggattcaaattatatattatcgtagtcgatttctaacatccaattcggattagcccgttgagctccgttggtagagcagccgactcttaatcggcaggtcgtgggttcgatccccacaatgggctttctttttgctctggaagtcgacctgttttttgtccttcgcgcttccctgtctcgccactcagtcgaatgatggacagaacttgcttacgcttgcctttcgacctactgtattgcctcgcactcgaaaatagcgggcgagtaataaatctaggcataagctgatctgaagcaagatgacgcggtggcgatcgcctgaggacgtgccagcgtgtcaaagagctggtctttactgtgagcagatggccagcccgcttcaaggacagtactggggtatgatacccttagaacgcgatcctcaatggccatacatgcgtaaggttttctgcggtgggcagtctggtagcactgttgctcataacattgacagtgaccgagtactcggtctcaatcgcgccgcatgaggcgatgtttggttcctaccattcggtgacacaggaacggcctgaccaagggccttgcacagtcctcatctgcgagacactgtataatatcataagggcgacagtgtctgctaggatagaggcccacgggagtcactacatgtggtacgaacaggattagtgtacaatacgtttcgtgctcgaaccggccatggctgccgaccgaatcaaaagccctacaaaatcccgcatcccgctcgtagagcaaacactcccttcgacgaattggcaggcggtagtcatagtggcacatatcgacatgccgcagcatcctgttgtgagcgctctgatcgaacatcgaggttgcattcgcccgagtcggatattctgcgttggctctatggttctcgaggtcgttgcgacagggcagccgacggtcactcattggatcagcagcacatccccgcggacggttaaagcgagggactgaaagggcaaggaggctcgccagacacctttaaaacgcccaatacgctagagtctctaaccccaccacaattgccaggaccgacaccgtccagagcggttcgagaccggccactaccgcgcacgcacggcacgaagcgcaaagtcgaccaagtggattgacagagaggctggccggagaccggccgcagaaacggcaagatcacttcaagatgaggcgatctgattaggactcgtgggatcatgtataaatgcattttgtaatctcgaataaactctaatttccacctcgcctccctgtgaatattccttgatggaacgcggtaaaattcctttattttacaaggcggatccagtctgactcctttttgctcgccctgaccgacgtcgtctcgcggcctggacctccagcctagttggctccctgagcgggctcgggagcggatcccttgggaggcttggtaggcgcgccgtggttcgagtcgcccaattctcccttgacggccttggagacgttttcggcaaagtattcgaggttgttcttgttcagaccggccatcgagattcgaccatcacgggtcctgcgaagtacggtgatgatatgcgcgtgttttgagtgaacggctcgctgtgggctaggcaattccggactcacatgtagatcgaagccttggcggcgagagcatcgacggcttcggccttgaggccggtgaaactgaacataccgatctggttggaaatgtgcttccagctgcccggggtgttcatgtcctcgagcactggcgaacaaacgcaggtggtaccggtctgtcagccctatcggctgcaaggacgtgaggggtgggccttttcgactcactgctctgcaggccgtgtctcatgtcgatgatcctgtcggccatccccttgacctcggtcaaccactgagcacgaagctgctcgtcgcccaagatcgaagagaccaatcgagcaccgctgcatagtcgccgtgactcgaggatcagcatccattgcgtggtgcagggggtgaagccgagattgcgcatgcactcactgaacgggagggttcgagtagagaggcctgatcaagatcttgatctgcgagtcaaccttctacactcgggccaagcgtgtacaatcttgtcagccaagccggcccccccggaatggactcgccctgcgactcacggccttttcctcggaagagctgcagacgatgctgaaagctccggctcgctctccgtagagacccatgttcttggcaaacgactgggtcaagatgggctgatgaccctcggcgacaaagtgtcggagggcaaaggcatcatagtcgatgtctcccgaggcgaaaccttggtaggcctaagtgtgcgaggggggccgacgttgttcatcagtcgtttgttcggatccgtctggtagttcccgaccccacggaggctcaccatgtcaaagaaggggaaatgacccttttccttgaaaatgttgctcaactctttccactggtcgtgggtaggatcgataccggtcgggttgtgagcacagctacgagacgggatgggtcatgggtggtcgagatcagaatcgtccccgatgttcgggacggagaccactcacgcgtgcaagaggatgatcgagttgtccggggcgttctaaacgggccgatgccacggggcggggtaaccggaagaggtcgaaagatcagcctctcacggtctataccatgtagccacggcacgacggcgacacctacctggatgtccctcttcatcccctcaaagttgagcccgacggtctccttgtcaaagtaagtgtactgcttgacctccaaccccgagtctttggcgatcggggtatggttaccccacgaaggagccgggaggtagatggcctttgcgtgggggtagaaccgggcctacacgggtacggacggaatctttgagcatcagcatgggcgtgtcgcacggaggagagacgtgtacgtgggtcgggtgcgttcacacgacttacgagaaaggcggttccgattcgaagggcaccggtccccgagatcgactgggcgacggcgacctgtacgagacgtgccgggtcaaccttcctgtaccatatctccctatcgcgggtggcccgggggtctggactcaccctgccctccttgatcggcttgctatcctttccataagccaactcggcgctcaatttcgtgaaatcgcccaacccggtgatgggcaggtattccttgtcgagggtggcattgaagagacgtttctcggcttcgaggaccgaggggaggacgtagggtttgccgttgccgtcacgctgagttgggcggccaggtggggggtgggtgtgtcgagccggttgttggaggggggacgaggcgttcaggtcggatcagccgtctcttccacgcctttccctctcacgggggatacacatccggctcggtgacgggtgacgtacataagctcctactccgaggttgatcttctttgaactcttgtccgctttgaaagcctcgctgacacctgcgagacggagaaagacgagagtgatgtggatgagggaggtgtcagttgattcggggttgtgctctgacgttgcacggaaacagtccggatgtggaagagaggtttgacccgaaaaaaaaccactacaaggacgagatgatgatggcacgacaaacttacctagaatagggtcggcaggtctgatcgaggacaaaaccaggtcgtatgggacgtgtcagccgaagagtacaacttgtggatgagtggaggagaagatcacttcgaccggaacccggaactcacccttgaggcacctgactccaaaagctggcggctcttacggatcgggtcgcgatggcgttgaacctggtcgtggtggtcaaggtcgatcgggtcaacatgatgagtggtcgatggtagagcaagacgatgtgtgtgtgcgtgagtgtgttgatgtggtgtatggagtgggtgttgaatggaaagtgatgatgatgatggttgaaccgctaacccgatccgagttggttgactggacgtggcgacgatgacggtccgatgtctcgctcgcttgagggagctgttgtttaaccgaatcaatcccccgaggggcaccccccctcagcgcctgtggtgataacgcataaatggtccgtgcacccacaacgcacactaccattttaccattttatgcgttatcatcgttgtcatccgccgccgcctcggtcatcttctcggttcaactgttcatcaaaccatatcctgcgctggtatttcgtaccaaacctgcagaggcttacagctgctgtagggctgtaagcctctgcaggtttggtacgaaataccagcgcaggatatggtttggctcatacgatgaccatcaacgtacgagtgatcgggatgggtattggcgctcgagatgatcgggttgataaagagcgctcgaaatcttgactatcgctctcgagacatcgacatctaggccagtcacttcagagacgacaaggatcgacacggcgcagagttccgacgtggaatcagatcagcggcatcgagtcgaggtatttcctcggttatcatttcaatgcgtctcattacaatcctgcctgtctgatcttgagaacgacgttttattacttcatacgtttcgaagtcgtgttttagatggcggcctacggaggtcgatccgatcagtgaccacgaactgaccagacggacgacgacaaagccttaccttgacacgctcctcggcttctttgaagttgacgacgttccagatggcgttcaggtactgtccggcaaaggggtcacgtcagatgtaagcaagtcagaacgctggcgactgcaggggcaagctataacccgtaaacctaggtgactcacatcgggcttgacgttcttgtactgcaagtagaagctggaaagagcggcgcggtcagtgcctgttcacaacgacgaaccccacggcgacgacccacgcatgctcccaaatgtcgataccgatgatgggaacgtgaggggcaaggacgggatcttggtccttggtagtgacaacctcaatcttgccattcgacttgttgtaggcctgcgagaggcacgaatgacgggtcagggcgaaggaaacgacacgtttgaggatcagcgatggactcacgacccatccccatcccgatccttgaatggcagcggtcttggcgttgacctcctttttcaatccgtcgataccaccgaaatcacgttcgactagctcgacaaatttgccaccttgaacgggcttggattcggggctgccagcaggagcgaggtttttccagaacaacgagtggttgatgtgaccgccgccgttgaacctgacggcgggttgaagggcgatgatctgcttgacggtggcgggagattgatcctgcgagtacaacttggaaagcgtctcttcggtggcgttcaagttggtgatgtacgtctggtggtgcttcttgtggtgaagctccatgatgtccttgatgatatggggctcgagggcctgcaatgcgtgacgagctcagacggagcgaaaacgacgaccaacgatccgaaatcgactcacatcgtaggcgtagggaagctcgggaagggtgtgttgacctcgagacatgacgacgggaatagactgggcgaggttgcgtcgagcgaggttgctggcggacagacggctgaccgagtgagtgatcttgcgtgcgaatgacatggcttcttgtatcggaggcgggtttcggcagaagagtcttgtaaagatgtgtgggtatgtgtgtgaccaattagctggctgtttctacgattgacggattgttggcgacgactttgaggttattatgccagagggcgaggatcgacggggtcaggagcgatgtggttggatatgtgtctgctatcaaataaactgggttcatcacgtcatcgactgaatacgacattaatacgtctcgtgacgtgtcatttcgatcacgatctcctccataattcacatcgtaccaaatgctcctccgtcaacaatcatctacgcatctatccaacatctacaatcaaccatcaaaacgtctagagtcacgtcgcacctacatctcatcccccaaaccagcctctcagtcgtcaaaagtctcactatgaacggcacaaactggttcaacgctgcagccggtggtcaaggcggtggagtcaacctcggggcttcctcttcgtctttgttcggtcaacctgctccgggcagcactaacgatcaacgtggtctctttggcaacaacgggatcaacgggaacaatgcaggcacgtccaatgtgtttggaggcaaccaactcggctcttctggcatgccctcgtcaccatcggcctcccagcaatcgttctttactggacgcgatcgagaaaacattccccaatccgatctcgccgagagccagaccttgcaatccaggtacctcgagagctttacccctgggaataagaaaaaaacgagcgccgtgagttcattatccagggcagctacacgtcgggcaaaagtctgaattctgagctgggcatcgccttacaggccaagacttctgcttctcctacaggacctatgagctttaccgaaccgtccaggttcggtagcaacagtctgtatggttctgggtgagttcatccgatgagcccatcactctggctccgctcttgagacctctactgactcgctctctgatgctggactcgttgcctcgacgttggatatggcagcgccggcgtctctccgagcaagactccacaccgactcgctcgtccacccatgacccactcgacgtcttctccgatgggcaactcgagtgttagatcccgaatgtcgactggaggctctggaggcagcgtctcgggggaagagaggggagcgaggatgggtgtggacgaggatagaccgcctgtggagagttatgccgatctcgaaggtatgggaagggcagaggagatgaacggtggagcaaaggggatggagcaggatgatggtatgcgaacggacgatgatgatggcgatgatgggtgggtcaatcggagtcatgccttcggaaacagtcgatggtcactgaaacaaccgcccatgttttctgttctcagcccggccaaccttttgatggtatatggcctcggcccctcgaaacaagaccgacttcaatctctcctctcgtcttacggtaccctcactcaattccacatcggaccttcggacagcaattacgtcgtcgtggcgtttgatgatccggccgtaggacccaggttgcagcggcagagcggagagttgaggttggacggttgttacctcggtgtgaaaaaggtcgacgagggaacgtggtccggcgtcaatggtgggcaatcccagcagcaaaggaccggtggccccgtcgagagacgagcccggcaagacgaacaacaccagacctcttccacacaatcccgacccgacgccctctctcggcccgattcgaatgatccttttgcctcgatctcgaccttgacgcctatcaaatcaggaagcgtctttagaccctcgactccggcggtgaatggtcagcaacagcaggtggccatcccttcgcaatacgcgtttggaaccggatctcaggcgcctactcagacgaggagcggattgttcggcagaatctccgacgtcatggtgagcctcgcacgttgcagcagcgaacgtggcattcgaagcgctgacgcgggtgactctttgtcgtacagttcggtcaatgaacggcaggcttttctcggagcggtgtttagtaatgggcgagaggctgggtcgatgtaatcacccttgaatggatctgacagatccgacctatgtttggcatgcgtttgagggcggttatgggggcaatacggccagcaactgggtcaataaggagtcatgaaatggaatcgcaagattgtctgggaaacaggtatcgtcgttcgggatcttgaaacgaggcgaacagcgagcgaaacctatggctcatggctcaccaaagcgaatcgaaacagcccgggctctgttctcggggtagaacacgaatcgccgacctcgatgaccccgacatcgctggtgaaccgcatcgatcctgtagcggctgtcgaagtctgcatcgtagttcccgatcgtagtatgaacacaagttgtctcgaccagccagccagacaacgtatgacggtcccgtattcaaccttctcgcgtctcaacggaaccgttcacctcggcgattgcgctctcgaccctactccttctgacgacagtggattttacgccttgcccccatactcgatcctgaccctaaccttgattttgacctcgcctcttatgatgggccaacgtctagatatctatttgtatgacccatgattccggtcggaatgtcagaaatataccggttggagccgacatttcgaccgaatcacgggttcaaaaagcggagttccgtgaatcaggacacttagccgttgggaagaatctacgatcagctatcagaaacattctccgacgaacaagactttcggatcttgccctgccctcgagatagttccagacgatatggctcgatttcagacgcctgtcatctcgagcttcacacagtcacaatgaaacggaccgacgaggaacgagccttgttatggaagattgatctcatgcgcaagtgacctctgagcagccgatcgacaaggcgctcccagactgatgctactgcgttcaaagtcctgccgatcctcacgttcagtttcggactgcaatacatggacaaggccgtactcaacagcgcctcggtgtttggaatcatcaaggacttggtgcgagagagcgagggccgacgccacatcccttcttagactgaccctcgacggcacaatgtttagggcttgtcgacgacctcaaacggcgtgacatcgactgctcggtattcgaccgccaatgctgccttttactatggttacatcgtctcggtcctgccgatcgccctcctcgtgcaacggctcccgatcgtcaagacattgtccgcattcatctttgtttggggggtcgtctgcctgctcaccattgtggtacacgactacccggggctcgtcgtgcaaagagtctttctaggattgaccgaggtgattgtggatgaacaagtagcttgcgcggtgcatgaatcaatctgacgtgacggtgacctacttataggccgccgtttcacccggctttgtcgccatgacatcgttgtggtataaaaaagaggagcgtgagtcgtgcgccggcatcgaaaacgccaagtccatcactaaagctggagctcgcagaggccacacgtctggggatttggtatggagccactggggtgagtcgatcgcttcatgacatggtagaacgttcgctgattctgtcttcgctcgagcagctgttcagcatgttctcgggagtcgtcttttatggcatcggacacgctgacgggtcgctgccggtatggaagtacatgtaggttggtgaggtgatccaggccggtacgccagccgactatggccgctgctttctaggtacatctttgcgggctcgttgaccatggcctgggcactggtcgtcctcttggtggttcccgacagcccaacgtcccctggtaaattcttcaagtcccccgaagaacgtacgctgctgctggaacgcctcgaaggcaacaaaacgggcaaagatcgcaccagcttcaagtggagtcaggcgaaagaggccgcgatggatttcaagatttggttgttcatgctgatggggtgcgtagttccgagtcggacgtgagacaattacccatcggctgacgaagtgaacgacagggccgcatcttatatctgcaacggcggtgtcactgcctttggagcccggatcgtcagctcgtttgggtacacgccgctgcaaacgatcctcctgctgattccgggaggagccgcgacagtggtgagtgcaacattgtgagactcgctgctcgtggtagcgattgacggcgttgtgtagacgagcctgctactctttggctggctagctggacgtaaagccgacattagaacgtacctcataccgatctcgtgcatccctccgatcgtcggcgcttgcatcatctggaaaggttcttgggttcatcggggattgcctctgtttggatattatctcttgccaacgttcgggacgccctacgtactcacgcaagtaacacacgcagtgtcatcgagatccaagtcgattgatgtgatgtcgttgcccgtcctctcgcagtctcgcgctcagctcggccaatgtcgcagggggaacgaaaaaggccatctcgacgggagccatctttatcggctacaatgccggcaagcaagtcgatgaggtgcagattcggtaaggacaagcggcgctgattcttcttgtctttttggtgcaatagcattgcagggtcttatcgtgagtagcgtgtgctcaaactcgttccgctcaaacacacgctgacactggtaatattcccagtcgtgttcacgtcagtagccttggatccggtcgggcatccgatgacggatccgactgacacgcctctccttctagcccggaaaaggcgattcactaccgatcgacttggatcgcagtcatcgtctcgatggtgtttgtgagctgtgcatcgttggtcttgcggtacatcatggtacaggaaaaccgcaaaagagacgccgccatgcctccaactcgagaccagatcgatatctccaaaggcaagctgatggagggccgtcaggtgcccgaggtgaccgacccgactttgtacgcctttgccgatctgaccgacaaggagcaaccgggtttcaggtactctttgtagtgaccatgaaatcgaagcgtgtgagctctatgacaagatcatggtcagaaaggacaggtgctatcggagtgtctcaatgatgccacctaccctccttgtaaggaaacatgaggcgactcgtaacgtcgtggtgttcgggcgatgcttgatagcggctcagtccattgagaccgggatggtggcttacgaggcatagttggtaaccttgatgactgtctcgattcagaggtgggccctcgcatatgagtcgattcgacagcacagattcgagttgggacaactgtcggacctcatttttgaatcggtcgatggtcgtagcaccgggtttgaacttgaacaagactggccagggcgagtcgtcagcgaggcgaggaccggtcactggctgcgaggagaagaacttgccgacgtgtatcagaagctgttcctctggcttatcctggctcgatggaaccatcagggcatccgttccgatagtaaacttgaggtggtctagccgggacgacggaaagtgtaaacgttcattcaagctcgagactggacgtttggctgacctcgaatggcatggctatcaacaacctgtcggtaatcatcaccagcctcgaacgtatcgcaatcctcgatggtctcatgtcgacgaaggactacctggtaaagtatgatcgtttcatcgacatcatcagccaggtccggtcgacgatgcaaatccagaagccatggctcgccgtttgaaagcctcgggatcgctcgatgggatccgtcagcgactctgtaccgatggtcaaagctgacagtccgagtctacaaaggccttcgagtttggagttgaacgttgagagttcgctgggatcgactctgtagaagtctggtgaacaagtcgagacatgttaatcggggccccggatatcatttcggagaggatgtgacgtgcctatcgcgacgatagaaccgaccatgatcaagggctggctttgtccagagttacagtcctatctgcttggataaagtgaacttggcatcttcacatggcatgttgtaaggattcgcggtctcgtcggactttgtcggtcggtcctcgagtttgggtcgctcttcgagtcatacaggtcaaggtacaaggtgcaaggtgactcgaatcgtttgatcctgcctgtgccccaattccaatttatatcgcaacgaaaccatctctcctctgggtcatatcgcctacacggagtccccattagatcattcgctcaaaacaccgcctcctggacatgaaagacaccacctctcttgtagatcccgaggatgccaggcgattcgctcgtgacgtgttgatgggcaatggcgtgccagtacaccatgcagagatcgcagctcgatgcctggtagaggcagatttgcgaggcgtagatactcatggcaagtcgtctgctcgttcaggctggttcaaggggtctcacggtgatagaatttgttgaccagggtgcaaccggatcccttcatacatgaagcggattcgtcaagaggtactcgctcccagtgtcgacattcgggtcgaacagatcacacccgtggtcagccagattgatggcaagaatggcgagtcagaagcgggttctggatattcatacagactcgagctgatccgtgcatgtgttcacggtcgaccctcaggcttcggcttcatttcggccgcccttggcatggattcgtgcatcgacatggccgcaacgtatggcatcgggatgtgttcaatcaagcattcgaatcatttcgggatgagcgcaagtttcgtcttacaagctgcgaggcgagggatgatgagcatggttttcaccaactcgtcgccagcggtgagtgcatcccaaggcccgagcgtctaccggtcatccataacgacgacgatcacctcgacagctcccggcttggggtggcatgtcacggctgatgggggtctcgccgatcgcttgcggtgcaccgggcgatgagcaagctggttcaggtcacttttgtctcgacatggcaccgtccgtagcagctcgaggcaaggtctacaaggcacttcgacggggcgaacagatcccatccgattgggctttggacggcgaggtaagagcgagagcgaggttaaaactagctgagcttgaggatctcattcggaatgttttgccgtggcttttcagggaagacctacgacggatcctgccgcggctcttgacggtgtcatgttgccgatgggtggacccaagggtagcgctctggccatcatgatggacgttttttccggggtcctctctggatcagcttttgccgtgagtcccataatgtccgcatcattttcgtcagttggattcatgcttcgctcgctgcagggtcatgtgactggtccgtacgacccgtccaagccagccgacgtaggacactttttgttggccatcaagcccgacctcttcatggagatgagcgagttcaaagcgagattgcgatacctttatgatcgcgttgttggatcagacaagatgcccggcgtggagaggatctattttccgggagaactggagcaggagtgtgccaaggtgggtctcgcgagatgaacattgtcaccgccctaagtctgacattgttggtcaggcccgagagacgacagggataccttgggtacaggccgagatcgatgcaatgaatgctgaagcggatctggtcggtgcgccgaggatcgtcgtcaaaaatacctcggcaagaccgtaaagtggacatagaacgtcattgtaaattgatatgctcctgataccctgaacaaagaagaggaaacccgattcggaaggagaacatgtaaaggcgactatgaacgagtgatgtggattcggattatgaagtaaagaaggtggtgatggatccatttgaggctggtaccctaggccttgtagttgcaacagcagtcgttgccctggctaggggctggaagagggcgcgatcgagaatcagtcgttgttccggcatcgaacgagcacaatgtcgagactcaccccaagcagagttcccctggcagtccttgttcttgaccaaaaagatgctcgacgagaggttcaagctaaagctgaacttggccgaggtcgaagcttctcccttcaaagagcacttcttgaggagagggctccaagaaataccggcgcattccttgccgtgcttggctgtagagtcggggtggactttccgtcagccgtgaccttggtatccctcacgtaagaccagcacttacaccagctgtccttgcattcgttggcacaggtctgcatagaatcacagccgaacgagaagaactgtaggaagtggatgtcatcagtcagggccgagagacgcctgtaagagggggataccaagactcacgctgtccaacgagtagtcgacacctgcgtaatgagcccaggagactccggaaccagtggacgacgggcaggtagggtagctagggtagctgggggtctggacaggaggagcaacggtgggctggacggtcacggtgacggtggtcttcttggtctcggtggcagggacgatctcggtgagcttggtagtaacgtaggcgcacttggtctcggtgacacggttggtctcggtggcaacgacgttggtgatggtaggtcggacggtcctgcagtgattgaccaggtcgtcgttagtgagaatgcattgcggcggatgtcgcgtatcgcactcactcggtaagagggacgacgatggtcttgacggggaccttgtagccgagagcggcgcacttgatctcggtcagcgcggcgtccttcaagtagagcttctggaagaagtcgttccaaatcgagttgaagaatcgcttgtgttggtagctgggggcggcggtgacgtaggcggtctcggtaacgtgttgggtggtcacggtcgaggtagcacggacgtgctcggtgatggtcgaggtggtgtacttggtctcggtgacgtgaacagtggccgtggcgtgaaccgtgacgggcgaagtgacggtttggtgctctaaaatcgccgcgcaatgtaagcatgttgtgagaacgaatagtaatcaagacctgaggactcacggtactgagtgacagtctttggcttgatggagcagcacatgtcgtagacattctgcttgccggcgaggaggtagagcgtgttccagtcgctctcgtagttgccctgccaagaaaggatgctcgagaaccaggggtcacgttcggcaaggtcacgggggacggcggcgccttggaccgaggtagcagccaaggtcaggagggtgacgagggtggtagattgagtgaggagcatcgtggtgattcgagaaagatttgaggatggaggtgagggactaggtggaggagagcgagatggtggtgatcgatgtgagagcggtgtcgagtgtgaagagaatgaaataggagtgtggcaatttcgacaaaatggacacacctcgactcgactctttatactcgacgtcgacgacctggctcaacgacgattcgccaatccattaggtgccacaatgaagatggcatgaattcattgaccgacgggactttacaatcgccggtgacgcgcgcttggaaggaatttgtctcggatatgctcgagaacacgcggaggtaatcaatatctgttagaggcccgtcttggtcttggcaacggggactgagttgcgtcggatccaggcggctctctttacatgacggcatctgtggcagtcattcgccggttccgactcaaaggtccgattgcttcaacgtggtcagagcccaatgtccgacacgtcaccggtcccgtccattttctagcgtcatttcattgaactcgtttacagagaccgctctggcctttagagctcattgttgagggacggactcaatcgaagcctacagagctctttcgggtccgagttgcaggaccaataacggggtcagtcaccatcccgtgccctcgatcggggtcgctcatagcgggcgggtcgagctatcaccggcggaaacctgcgtgaaatgaatggggaagagcgcgtttctccgtgggatggatatttcacgcacagtcacgggcccgataccgatatgggagtggaacccaattctacgggacccaaattgaatatcatcgtcgtcatcctgcacaacctcgaatcaattcgtcatacggcgctgcgagaccacggaacatgcggatgctacagagggtgcagatgtctcggtcgggtgtctatcccggcatcatcagttgagaactaaaaagtgccctacgggtgctgcgctgcgggatctacgccacggcagcgtctgtcaaaggagcgctgtctctttcgcttccgatgcatttccttgttcgcttccatgtcctccatgtagactatcgaccctggggggtgatcgaggctcctcagtggaaggcggctagcgaggggaccgttgatcggggtttcagccgccaaaaaaaaacgatcgaagagagccgacgcttcgatgaccgtcgtggagagactagtgcgaagtcgaggatatgtagcgagcgcaaacggtgaagggttcttagttcgacgagaagccagttcgagaaggagcttgcactcagcttctcgcggggtgttcttaggggtgtggaaggaccaggcggaaagcgcgaggcttgcagatacaatcacaaaagggcaccttcaatccatccgccagtccaagggacttagcagagcatcgacggcgccacagtatgaccgggcggtgggacatgacaggtcgaggtcgaagataccaagctcgagccacccgccaagcagtgctggtagattatcgactggctgatagcagagcatcgcattcacggtggtatccggacttgaaccttgtggtcgaatgataagctgatcatacgcatgaaatgcccgtccacctaggtcgacgcttgtctctctgacaacacacagcaaggggatgtcggtcctgggaacgtccgatcgtgacattgagcgttatcttcttcgatcattataatatgttgccattcgacagagacgattttgctactcgatcaaagcaataacgttcgcacacgacttcagactcgcacgtcgatatccgtagcgtcatacccgccaatctcgcgtccttccatataactctccttgcctttacccagcaccatgaatgcgcctcgaataatattactcttgacataccaccccagtccgctggacgaggctccccggctggactcggccttggcggtcatcttgcggaccatatcgatacgtggccgacgaagacgttcgaacagggcgaaagtctggtcgtacgatgtcgaatcagagtcggagaggagacgggccatgacgccaacgtcttcgaaggcttgagccgcaccttgtccgagggagggtgggacggcgtgagcggcatcgcccaaaacgcaggtacgctgggtgtgccatcccggtagatctggcatctcgtacggggcccagagtcgaaggttggaagagtctacgttgcggatcatgctacggatgggttcgatcgtgacgtgaccccactcggattgcagttgggcgacggcctgtcccgaagtcttgaaatcttgccactcgtgacggtcgcgttcggggacttgactggtggtcgcccactggaccgtatcatcgtccatggcaaaggctaggatggtgccagagcgagtatagaaaaatgccgggagctgcatgcctgccggaagtttgacttgggaccgaggcatcacacagccgagggacaacgacccgctgtacttgggcgtaacctgagtcgaggtttggaggatgtgtttgcggacgagagaaccaataccatccgctccgatgatggcgtcgcctataggactcagtgagacgggagttagaaaccgtgacttttgccatacaaacttgataactaagcacctttgatcctggtcccgtcgtcaagcacggcgtaaacggcatcgggttgctcgtcgattcgctcgagcttgcttccataccgcatggtgaccctcccatcgtcaaactctttgcacctctcgaggagaatctcttgcaagaccggcctggcgatggtcaatccgcggacccctccgttggtcgtcataaatccaccagctcgggcaagggcatcagaggattcggtgtagatgtcgatagcgtcgtacgaacaacccgcagctcgtagacgaggttcgatgccgaccatcttgtcaaggactcgcatggcgtttggggcgacaaggatgactccaccaatgttgcgaggttccgtgtgtcgttcgaggatggtcgatcggattccctgactcgctagggcggaggccaaagcgggtccggcgagaccagcaccgacaatgatgatgtgtcgagaggattgcattaggttgcgtgggtgggcagatgttcgtcgtgaggttgtgaagtggtcgtcgtgtggcagaccgtcgattggcaacgctgacgacctattcgacgtacctgtatatatcctcgacttgcccactccctgctccctctgacgatgaccggggcaaggacctgaccaggtgatcgtgacgacagcgacctattcacatacgaatcacctcggccacggtcgagatgatgcccgtccccgtttttcgaccacctcggtgccgaaagccaatgcccgtgtctttgttggatccgaatatgcttccgattttagcttccggctctcgtctcggcgccgcctcagtactatagcgcgcgcgggcgagatccctttcggggttcgtgacgacgagttcgaaagcgggcgagtctcgatacagttacgaaggcacaatcagttccccgcacccctgcgataccgaacgttgcaccgagctcccacagaatcggtcggcagaagaagaggatttggctcgtctgcgttaccgaataatctcccgccatcgttggacaggtaaagttgtccggggtcgattccatcagacacgattccgcggaatcatgtttggacgataccagtcgggtggtcctgctcgatatgcctacccagtcaccggccgattgggttgggagccagggaaccggataatgccgtgagttcctccttgatcgaagttcccattaaccccgttgtcgtataattgcctcatccacgacccatgacccttttaaccacactcttcccgtctcgcaaatcttcttccacatgtactccacttcgacctttgtgacactcgaagaaagccgaccaatcccgactagacctgtttccatcttcgtcccatgaactcctcggaatgacgtttcgtcaaattcgcagctcgtccattgctgtgctagacttcaggccccgtccattcattctgaaatctataacaggctcgaaaaaactggctccgagatgtaacatgatcatgatcgattcctttcagtcgaaatccgccagttttgatcccaaacacccccctgcgccggttaaaagattcctgtatggtcacctttacaacaggctgagaatcggttaaagacacggtcgcagacagggaaccggcgatcaaggaagaatgacataagctcgactgatcgatacttctatagggccacaacgaaagcagcaaactgacacgagatgatggtccttgcagaccaaaccaggaggacaagcagcgctgaggaacaccatgattgcaaacgtgttatgtccatccgtcgtccgtgttgacgcaactatcgatgttgaaaccgagcgcatccgagtttcgtcttgatgtaccctcgagcacagctgtagacatatttaccggccacacagtccgaggacgcaacgtcttctacggcagaacagtcgcgggtttcaagatctccggggcaccctccgcagctttccaacgaactctggacgttgatattttatgtaaacaaggcgtgaatcgtgtcacatgtgtagcgccgcgagtcagacctatcaagtcgttagacttaccattccttcaaaccccttcgaccctggatcggacaagatctaaatctcggagcacatcgtgataaggatcttcgacgcctcgcagtcgccactgcagtgcaagccgtctgatcattgttaggtgcggggccggcgttgcaaaccgtgcaggaagaggaccttttcgtcgcatgaaattcccaatactgtatagtcatgaacctacagctcctgactcactgtacatcagggctgacagatccgactggacaggctacgcagcattgaatggcgtaaaccagcgtcaaagcgaaagggtcgtagatggattgatccgcctggggatcggtgaacgttgctgatcccccggggcataggcggcattggaatatgctggttgattttttggggttagctcttgtctcctgagctctgctggaccgtcttgttgctggcgcgtcacccgggtgactagtcggtagtcctctttacgcgtatccgttttggttgaaacgaacggttcaagcaaggactcgtaggatggactgggcaacgacttttaggcttgaaactgtcaaatgacacgatcgccccgcatcgactcgagattttgcgatgcctgcattaccggttttgagcaagatctgtagcgcctcgatacatagggcagagaaacagccccaacacgacatcgagtcggaggttatccgtcgtcgaaaccaagccacgtgaagaattgaaatgtggaggtggaggtttgaccatatctcttgctgacgtttcatcggaacagcaagtatgcaacttggctcctcggtcatcgtcagcgcagctcgggatgaccagctatagcttgtacacgtggcattacaggcgatggcgatgggtatggacagaccagtcgacgctcgtaacgtcgcggcgatcgagacgtcaccaggtctgcgtgatggagtctccttacgtgggtccccgatcgatcgttttggaaccctacacttcatatatagagcaacgacggccgttcagacttgattggacaaccgggaggatacaatctccatacgaaaagaccaccgatctaaagaaggcctagcgacggtcggacgtatccaacagaactagagatcattgcattttcctttcgattaccagcattacacgcctgccagctgaaatcacgcgcacaccatggctgccaacacgtttttcaacatggcatccttatcggacaagaacatctcactctactttcttcccatcgtgagctctcgcaggcgatctgcctgagccgaacccgatcttgacgcccgagctacgacgcaggtctggatgctaggattcgtccctcacgaactcaagctcttgcgtctcggatcgaggtacagcaatttcaagccccgagaccccgtcgagttccgtcagggcgattcggaaaagtacaaggaacatatcgaaaagctaggttccatgcaccacaacggggtcgaggcgttccccttgttcgccgctaccatcgtaagtacgacgtgtaagccgatatcactaagcctcggaatctcatctgataatcgaaactcgatcgtattctaagctcgctgcgaacgttgcccacctcccggtcccttacctcaactcgtacgcgcttacctacacggtttcccggctcgtatacaacatcgtctactacactcaggtcggcttctttaccgatagtatccggacagccatctatgttggtggaatgttcgggaacttgtgggtgatgtacttgtcggcaaagaggttgtcgacctagtccgttggagaaattgacgggggggatgggaaggcgacagtggtggtcccctctatgtctatgtaaacgattacgagcacgtcgcctaaacctgtatacactcgagcacttcattctcagcgaatctaatcacgtcgtagactcgctgcgctagccttcagactctcccacaagcactgctagggcacaaactgcgcaagcagagtgcgtgatatcaaatctcggatgttatttgcgccagatggtcatggagcatatccaaacttgctgagaccatcgattcgaatcgcgctgatcgtcatatagacgtgacattcaattcgtctaatcgccttgtcaatgcaagcaatcgagtcgtaccgactccttattcatatagtcggctcttattcgaatgaatctaccgttcatgactcggatgactcaacgatggacctgatctcgccaacagcgtctgagaccgaggtcgatcagttttggggtccccacaatcaaaatgatccaatcgactcgcaagtcataaaagtcggtcgaaacctcttaggcttgtccttttaccagcgggacgtcgctttctcacttttaaagtacctcacataactcagagtgagaagcactaaacaagctatagcaagagcgacaagagcaacgtcggctcaggagacttacagtgtatctcggagctcagccatctcgatttgacaatgcctgccaagatcgatctcgacccgaaagacttttccattggtatcgtcggagcggggtgagaaaagtcgtctaatttcgacccttaaagctccctgctcatcgctcactctacgtttattagtatctcggggatcacgctcgctatccgactccacgagattgggttccacaactttaccgtcagtatcgtagtctagactcggtaccatggcgtctccgctggaaacgttctacgctggttgcaccatccagatctacgaacgagacgtcgatgtgggaggcacttggctgacaaacgcatacccagtgagtcgctcgctgcttcggcatgaagcatcgcccgaaagactaactttgacgtcaattccagggatgccgctgcgagtaagctccgtctaagccaaagatttcatatcattgtgctcaatctgccaacaccctcctctcgatagcatcgccgcccacctctactcgctatcaagtcacccaaacccagactggaccgaagtacacccacctcaatccgagatcctggcttgcaagtgtctgatcgatatgtctcgcctgaacgtgcagccgactgatccgcacgtgatacagattggcaagacattgcccgtaaagaaaacatctacccgcactgccagttccttacgtcgttcgtctctgccgaatggcaccaaccgagctcatcctggaccttcaagctcaaacgaaccccgtccaaatcgaccttcaacgcttacgccgacccgaccgatcgctctcttacacctggccgatccgacggtgagattttcgagcgacgacattcgatcttggtcggggggaccggtgggttctcttggcctatgatccccaatacccaaggtcttcgcaacccttacctcgaagatggtcagcccgcgtctctattcaaagtacacgagcaggacgaggtccccgtacagactgggactgaggaccgggaacggctcaatgacaccccggaagagcagtttgaaggacaagtcattcaccccgcaaggtggccacgacaaggactcgatctgaagggcaagcgggtcgccgtgctaggaaacggttgcagtgcgacacagatcgtctctgctctcgccgcaagtccggaaattgagttgctcaactttgtccgctctggtcagtggttcttaccgaggtgagctgtggacccccgttcgggcgttctcgaaactgactcagcggaacgtctcgctttccagatcggacgctccctactcgttcatcttccagcttttgctacgcaagatccctggcctcattcagctctaccggtttatccttttctgcaagcaggacgtcatctttttcgccttcaagcttcaaaacgcttggtttcgcaagctggttgaaaaggtggtgcagaactgagggccccccaaaccgtcattgtgctaatgtttgtcgtcataggcctcggcgagtcatatcaaaaagagtgctccaggcgcgactgtcagtcttttaaccccaaagtttcgtgagtcattgaagcttgttcgcaaagagtccgggcttagattgcgcatctagcttttggagccaaacgaaccgtgatggaccggtaaataagaggcccaaagagtctcccgatttcagcgcactgattcaatgcttgctaccgcatagaggctacttggacagtctaaggcagcccaacgttaaagccatcactcaacccatctctcgattcagcaagaatggcatcgtcacttcggatggtgagtccggtccccgctacatcgctgtgatgaccccttctcacctggctcgtacttccggcaggcattacgcacgagatcgacgtggctgtcatcgctactggctacgacatcgtgagcgcttcgtccccgccccatcgggcttgcagctgaagcataatgcctattcagaccgcctcgatgttggacgtcaccggcaaggattccgtccatctgagcgacagcgtgctgaaagaggatggtcctggagcatatcgcggcgtgagttgacctcgttcatgccgatcatccgtcgtagctcaccgccgtctgtcgaactcgcccagatgatgtatccgggattcccaaacatgtatatcatgttgggacacaacgtcgccccaggccatactagcgtcatgatcaacattgaagtgcaggccaagtacatcgcccaggtcgtcaaggctcagctacaaggcaactcgaaggtgatcgaggtcaagcgagagccgacgaagcgctacatggagtgagtctgactgttccgtctttatcgcttcgttgaagctgaccccaccttgacatcgtcctgacagctggctagacaagcgaatcgcaaacaccacctggaccaagaccagttcgttctatcgactcggcaaggacagaaaaggtcgagtcatcaccaattggccggcgtacacctcggtgtattgttatcagaaccgtacccccaactgggtcgatctcgctggtgccgaaaagatggcaatcaagagccggttggccaggcagaaacgaatcaggctgtttgtcacagctctgatgtgcctcttggcatatcgcctgctgggaaccagaaagtagccggttgatatgacataacttgaaacgaactatagatttacggaaacatatactttacgactagatgcgcgacacgtcatacggcttcatgtttaccatgtcaaatgaccgcttcccatgctaattcttgctcctgcgacgcctcttgaactgcttacgataagaatcgtcagtgtcgcttaggtcgacgacgctggccttacggattgcagatgcgacagacgacgaatcgccggcgacggggtacggattttcaataatctcaaacccgtcgtcagacgattcgtcggccctatccgcaacctgtctaatctccgcgggagaaccggccgatttcggcacgatcgcagccccaccagcgccgcggcctgaagcgacacgtcgacccttgctcgattgatagcaagtacagatggtgctcagctcggatctcaatgccggatccaaagacgtagccaacgcttcacgatatgcaaagccttgggctgctgccttgtacacgctgtacgcatctccgatcacgcggtcgtggcattttactatcgagacgagcagatcacattagctatcgagtacgacgaccagatcccaaagtgactctgaccggtagttcgatagagttcatcttctccccgactcatcgacgggtatatcattttgcaaccaagtatcgcctgcaacttttgattcgccgtgttgggttccggaatcgctgtcaaacgatcccgctgatgtgttccgatgaatcgagcaaagaatgggagacatagcttgttgaatagcgccctcgttgcgtcaaaacaccaaccactatcaatcaatactcctgcgaaaagagtataaatgtaatcttccacacgctgtcaagtcaccaacatcagtgtacattccagcagattctcagcgctgacaccttgactgactggagggttgacgagcctggtccacgcaagggacagctcggtttgcgtgtcgatggttttctgtagctctttctggaacgtcatgactttgtattgcactgcgaccggttcgttctgggcatgcctgtatagcccgctcgagacccaaagcgcagccaagctcacctggatagagtttgggtgggggtgatcagcgaatcaaactggagggtaacatgcctttacttacatgagagtacattggcgactggtgagggacggaaaacgtcagcaccgtcgagtgcgaccgcggccggaacgttacgcaaactcaccctccaccgcgtcaattgcccaggtcccaagttctgagttgccccttgctcgataagataggacatcaggactagaaagatcggagcgaatatcagcggtctggaccagtcgtcaacttgtctcgacttgctgtattcgaaaatggcgcctcctaggaatgtcaatttggtcgcagtggccgtcgagaccgccacctggcgtccctttagattctgtacagggcaggatcggagctgttcagatttactgcctacaaccggagcacgccacgcgacataccatgatcatgcccaagaggtttctgttggtaaacgcgtgaccggtgatgacctgaatagaggcgacgtcacgcaaggatgctacgtcacgcccataattgagcgaggacgatgtctgtgcgatatcttgccaagtgataggagatgggaatgatctaggaaagagccgcatacacgtctgtaagatcagctcgtgatctttcagcttcccgacggctccggctagagcttcagcgacatcggcgattgactatggggagatggaggatgtcagtggaaggccggaagatcaaccggcacgatagactcgcctttctgtggacccgtgttggccgcttggggggctcggtgatgggcccgtttggggaatttttgtatccgcacccgggaggcacaaatgttgtcgagtcgatcggctcattcaagatgtattcggcagctccacattcgtgcatgccctcagcaagtggcacgttgtcggtgatgctgcgtacaagcacggcgagctgttgtgagatgtgggtcggactggtataatagtagtacgctgtggcggcgagtttccagtacgtatccccagcgaattcgaggacctcacaatcgacatgcctagaactcgccgtggtcgaaagcgcagccagcacatcgtacgtgtcggcacgagaaccgaggtatttcatgttgacttcttgtgcaaggagcaggctatcgatcgtccacatgatccaggggagcaggtatgccgagtgatagatactgcgagtgccgggatggcttcagcgcaaaggccgtgtggccaatcagcgcactactgctcaccttttggctatcgtgcttggtgtctcgttctttggacagacgactatagaaggtcaaaccgaagatcgtcaataaccgaatatcatgtcaagcgcagcctcactcacacatctcggtcggagtgctaactctgggcgacgtgttccagaagtctggtatcggcctcaacttgaagacaggaccgctaactcgaggcgacctgcgattcatcttggtggcttgatgattagcccggttttccgctttgagtcgagcctcctcgtcgcggcggatttcaaccacctcgttgtactggcttcccccgatcacgtacacgctctcctctgccagtgtcgcgagcccctggcctccagattcaagaccggtcactgtacgcgactcgttagccaaagcatcctcgatctctttccacgcgatatttttgccaatattggttctctcagtggaattgacctcgctcgtggccttgtctgccgagttccaactacgggacattggaagaatcaagtacggaagtttgccaggaaccgagtgaagcggacggcgccgagggatcgagaacaacgtgagcgtataagcttgagccttggcgacttccccggcgtcgaacttcaagtcaaagccttgttccaggacggcctcgacgacgatgacgcccttgcacgtcggtagaggtcgacccataggcagcgaaaagcgatgacgtgtcaggatgcacatggtgcggtactgcctcggttccctgtcaaattcttgcttgtgaatcggcttgatcctgcacaaggtcgcgcagtacgatccgaccgacaagggcgtacaagccttccagaacttgggtgttttgctttcgatagcgctctgttcaccggtcggtatgtcaggtcggtctcgtcggtttcttctgccgacgtcaggcaccctggaaggacccgctttggaagtctccatcagggcgtcattccatggtgcaaccggtcgaggtggtaggttcggattaaagggtagaggccgggttgcaggatgaaccgttggtacgggagccgccgcctgatgcacttcagacatgggctctgatgcgctgtcttcactcacaacgacttcctcgcgattgcctctgatcgaccccccgtccaccgacccgccatccaccaaacttggaccacccggcacgaattcgaactggtgatcgagccagcccgacatgtacagcgccgccacatacgtcagataggcgagctccctggctctcgtcacgcgagaacccgtgtccgagatgatcgtatcgaggcccatgatcggagggctgtcaaatgcgaaagcctttgactgagctgcaccttgagtggcactgacgatctctctcatgacaatgctgccgtaaccacggttgttcatctgcatgttgacgtcgtcaaacaccttgacggccgatttgtccgtgacacgggcatcggattgattgtttgtcaactcgacaaacgagaacggggagccctttttgtctatcagggcgtcgtagtgcgggttgggagccttgttgatgaagagcgtccggccatgtggaccgaggtggagttgactgtccttgcttctaatggtagggattccacgggcaggaatgccgagatctgcgagggttcgtcggcgtgtaggtacgggcagctggacggagtcgacggcgagtgcagtgacaggaagttgctcttcaggatcagacatgtggacgtccacgatagcaagcagcgaatcatcaatctcatcctcgtctcgatccaggagcatgcccttctcatcttcggacatggtcgagctgccaacctgcagatctttggtctgaatgttatttcgcggatcgagctgtaacccgtagtcctgtttcagccttacgtcaccaaccgagtcgtcctcttctcgaaagacgtagaagtgatgaccgggacgcttgtggcatttctgcaagggcatcttcttggccgcttccgatccgatcatgtcgtagctaggaaggcaattcgtatgagaatcaactcgttgtcgtccatcgcaactggcagcctcccctcgaccatggacttactggacgacggtgcaaggtgccaattgccatttaatatcctcgaagacgggtaccaacaagacgttgtagtctgcctgatcaaagttgacattccaagtatctccagccgcctcggccaacgtttccgtgctcaggctagccgtcgatatttgatgatgtacgagcagcttgtgcagagtcttagctgtgagatcgtccttgactgcggcaagattgcgacaggatcagtctttacggtatgccccactgtccaggacctgcgtctgacttgcctacgagaaaacacttccaatcgcccggatcctgcggaccgtctgcctcccgttcaaagagtctcaagagttgcaatagcttgttcatcttatcgttgaccgggatgctcgtctgatcatcagccatcctttgctcagagatgaatcgcttgatgttcctcagggtggccagttgttgtacttcttcctcggtcatttgctcatacaccttctcgccctgctcgtcggggaccaccacgccatctttcgcctcgtctcgggcgtcttccatgggtacgaccttgttcttccgagtgagacttgtccatgtagttgagttgatcttcatcaatttctcgagaaaaggtatcgctcctgccggtccgaattggtgaatcaccttcctcaacccgttcgagacggaccctgtctcttgtttgtcaaacgggacaatcaaccctgtttgtccgggggattcgaacgcctctctaagatagtcgtcgaggtttctcaattgatcgtaaagatgttgatggtcctgttcagcatcggatcgatcacgataccagacgatcccgttggggatggccagggaacctcggtaagcgggcgagacttggtgtgggggccgtatcgggtgaatgagtcggaagttgagaatcgtagacatcgcacagtggctatagagagcgtttggtcgccttcaagctagtccgtacggctgcgcgaacccagtccggatcagcggagaggcgagtgagggagattaaggaatggcaaaaggctcggttcttgtatgggtaggaccgagtgggatcgcagccagagatctccggtaaaaggtcgtttctccgcctcgatctgtagctgtatcttgaacgagggcaatacgttcacctcgatatagcagggggtgttagcagaagatggaatatggaatcgccatcattaaacatttgatcgaggttgatcgaggttgattgatgggacgaattggcattttgatggtgaatatacttccgaccggcggcatttctgcttcccaccaggtgagattagcttccgaaatttacgtcatcttcatctcgtcatcttgatacctggaaactcgatcgatcgccgaccaagagcgaagagccagagagcttcatggatcgttgacgacaacgacgacgacgacgacgacgacgacgacgacgatgataacgacccatttacttctttgcgaagctccagtttggaagtagggcaagtgctgctgtactcaggttgaagcaatcaaagagctacacatcctccaccgaaatgtccttgtcttacctggtctccacggctggtcacgctcaggctcaaaacgacgagaacccgcacgacattgtcaccctgaaccagctcgtcagacaaggcgcgaaagagctaggagacaagcccgtagtagggttcgccgtgccctcgacgacggagaaggatgtttggggatgtgaacaatattgtgagtctctgccgttatttttatcgagcggacgagctcaccatcccgctcttcaacttccatagcctataaacagctggtacaactctcaaagagctttgccgattcgatccgaccgcagcttcagctcgaacaccactcatcaggcacttcagcagataatcagatcgtctcgctactatgtccgaccggcctggatttcctggtcgcatggatagcatgcatgggactcggactcggtgtggtattcgtcgcgcaagtctctaggttggtccacatcaagggctatatcaccgtgttgacttctcctcgacttctccttgtagccctcaatgttccgcctcggccgtgtcacatctgctggaatcgacaaaatcgacgcacctgctgtatcattcacgatatcaagatctagccgaatacacccgcaagcaatcgccctctacgccattactgttacttcctaccgtctcatccttggattcctacgaattcgatccgacctggccgcccgaacctcctcatccagactcggtatcccacatcttccacacgtcgggaacgtccggtacacccaagccgatcccgcatttccaccgggccgaagtcctcgctctgcctcgtcgagacttgggacatcccgatacgctccagtcggctttcaccaccacgcctttgtttcacggtggtgtctccgatctactgcgagcttggatggcgaggagcacgttgtacctctttcctagcagtaccagccccataacctcaaagtccattgtggattccgtccaggcctgtcgagccgtcgccgcggatcaagggatcacttctttcctctcggtaccttacatcctgacgctcctctccccggctagtgatccagaggacaaggtcggggcgacggccttgttggccgggatggacatcgtgagtaccgggggagctccgctggacactgctgtcggggacggactcgtccagcgaggcgtcaacctcgtcagtcgactaggaagcagtgaatgcgggtgtgagtaggcaacgtcccgtacacgatcggccgtagcacgtctgctgagtcctccttgacttctgcctacctagtcctcttgacctcgtaccgggactttgcggaggacacagaatgggaatggttgcataacgattcggcgtacgcatcggcacttgtgttcgagccggtcgaggggaacaaggccgagatggtcgttaccgccgaatggcgcagcaaggtaagtaagcgagcagcgatcatggcctgctgcgacgcagtatgtcgacccgagattctcaatcgctgcaggtcaaatccaaccgccctgacgggagttatgcgaccggggatatttatgagaggcacgcgacaaagccaaatgtatggcgatatgccggtcgaggcgacgatgtgctcgtcatggtaagcccgcttgttactcgcctggatctggcccgccctgacctcgcgtcttgcagtcgaacggagagaagatgtcgccagggccgatagaaacgatcctccgctcctccagcctcgtagcggatgctctggtagtagggagcaacagacctcaggtggggtgtctgatcttcccccagacctttcctccagtatcggacctggtaaaacagctcgccggactcgtcgctcaggccaacgaacagtccccatcgcacgctcaacttggaagcgagatgtgcctcgtcattacggaggcggaacgggcggccgccctgccaaaaagtagcaaaggaacgatccagcgtggagtcgcctatgatacgtatagaagcgagatcgacacgctttacggagaatcgagcgggaccagtgaggacaagctcgacctggcgggtccagagctagagcgttggctgttggacaaggttggcgagatcatgggcgacggaaagcgtttcaaccaagacgagctcgacgtcgagaccgacttgttttcctggggggtcgattccgtcaaggcggcgaggctgaggttcgccatgatgaaggtatggtcctgggcgagggcgaaagggggtttcgatggctgattgcatgttcactgtaggacctggacattggtggccagagtctacctatgaacgtggtcttcgagtacagcactgtcaaaaggtcagatacggagcggtgacgtctcgtcagtaggctgtgttgaccatgacacgtcgcaggttggcacaactatgtacctcgcttcagcaaggcaaacaggccgagtcgctcagcgctgatgagcaacaccagaagatgatggctctcgttgaaaagtacggcaatttcgaggccgttaatggagacgccaatgcgcaacaagttcgggatgattcgtcgggaggccagaccatagtgagtgctacatgtgaacgccccggatttagatatctcaacgcccttcgcttgcaactgtcgatagatcctgactggcgcaacaggatctctggggtcacatctcttggctcaactggttggacggcccgaaacccaggtcaggcaagtgatatgcctggttcggggagactcggtcgaggcggcgacgggtcgagtccggaaagccttgtcagctcgcggtttgtcggcgcccacagaacgatactcggtaatggtcgcccgtctcggaaagacacagcttggcatgagcgacgtagattatgatcagctgcgtaaaccggtcgacgtaatcatccacgtaagtcggcttgtaacgcatatccaagaacgcagctgaatattgtgtttcaggctgcttgggccgtacactttggcagtggactggattctttcgagagcgaccacatccgaggtaagccaaatctccgtgcctgacattgcgtgttccgcactcactttgaacgcgatatagggacccgtcgtctgctcgacctggctgcgatctcgacgcggagagctaggctactcttttgttcgagcttggcgagcgtcctgaacaatgccagtctcgacgcgcccatcgctgaagtcttgacagacagcccctcgacatcgattccgatcggctatagccagtcaaaatgggtgacggagcagctatgtggtaaagcggcatcgatgaccttgcacaatcgggtccaagttttgcgaataggacaactatgcggtgacacggagcgagggatgtggaacgagtccgagggatggccgttgatgttgcgaacggccggggtaacaggaaagctgcccctgttgaacgaggtcggtcgccgtgtccgcaccttgcgcgtggcgtagctcatctcttgtcgcctcatacaggacccttcttggttacctgtcgatatcgcagcatcagccgtgtaagtagcagcgcaaacgtactcatggttctgcgctcatcgatccgacttctgctgcagcatggagatcgcactgaacggcgacaaagatcgaccgttggtaacacacgtcgccaacccgcatcctaaccgttggcaagacattttgcgcggtctgaccgaggcaggcgtctccttcgaagcggtcgacacgactgaatgggtcgacgcagtggaatcgtctgaaggtgatgacacgacgaatccgagcaaaaagatgcttgccatgtggaaagctgcggtgcgtgtgagccgatgcaaatggtcttgatggtccgctgacgatgatttctcttggcttacagtacggagattctaaggcaggcaacaaacccgcggcgcctgtgtcgacgaccaaggccacaacgctgtctcccgccttggcttcgtgcggacctgtttcgtcggaactgatcggcaaaatggtaactcgctggcgagagtcgggtttcttgacctaatagatgcgtatcatagagaggacggccgcgaatcgaatgatatatacagccttgtcgatgcgagacgaggtgaatgcgaaaaggatacaacaatactgcgcaacgtccgaaatctagttgaatccggctccgccgctgcaatggaaagacaatatcagcccgttgtcccgagacggcaaatgacaatacgactcactctggcagcctctcgatctggtactttctccgtgcgacatacatgagcggtacacccggcacctttctcaatctccttctcaaatctcgatcacactgtacgagtcgttgagcgttcgtcagtcgatttgcagcgaacgggtctggtgtcagagaacggtcgtgtggatactcacggtggcaacgacgtaacacttgttgacggtcactcggttgacgagacaatcgtccgcatatgttccctggtctggcgacggatagaacggagggcttccgatgagttccaatgtgcgcatatggacagcaggtcgggggcgaaactcacgtgaacagggtaatcgatcgaaccggggatcccgtgcgaccctgcggcgagacaaagtgacaagttcagttgacgatccctcgtgcttgttagcctgacgtcgaaaggtgagtactgacttcagtgccattcgatatcgaggtcctagcttttccaactctgccaatacgcaatccgtgatcgtggggatacctgtcgacatatcgattgcagcgtgaatcaaatcagcgatcgtggtagtaaacgtatcctgagcagtggtcgactcacactttgccatcagacaatccatcattccctgtacgagttcgatcttgttttgcagcgaaaagttgataaagttggtatccaccaggacgcgataaggcggtccgagcgactcgttgtgcgacaagaagagcgaggcgggcaaagggttgacccgtttcttctcctcctttttcttctcgacctcgacctttttagcggccttttctacgttttccttgagacgaggatcgctgggtttgatcatccgcttgacggcggcgaatttgcgggtcgtcttggctttaccctgcaggtgatgtgcagaggtcgaagtgaggtcagcttcgattcaacgtcaaaaaggctgagcgagggttcgagtggcgcgtctgcttaccattgttgtgatatgttgttttggatgcggtgaatgctaatatgatcgaaatgttttgatactgatggaaccactatgtctgatctgagcctcatagagatgggtaattgtcgagtataacctttaattgcctactctcccggacatgagcgtcaaataattcacggacatcccaagatttccacgttgaacagaaacatggcaatgtccgctcttggtcgatgccgaagccgatgccgagaaggattgagtccgtcgctcgcgtcataaatacctccgacatctctcatttacgagccggccgagcgaccctcttgcaactcgcagagatcatcgcgcagtacttcgcactggccaagagatcgtctaccctcgcctggtgtttactctaatcgctgttgcctgcgtcactgcgaagccaaccacctagtgagtgtattgtcagctggtcgccagcctcgcttggtagtccccttcgcaggcctcacagctgtcatggtcccatcgttgacatgtgttcgcgctacttctgggcgctagtcgcgtcaaatcccggggtccctcgtgtcagcttcccgctgtgccgatcatcgattccgcgggggaaagcagggtggaggacgcgatcaaaaccgaaacaacgtgtttagactgcccacacctgtcgccgcctttgctacaccctggctgcgggtgccaaggagctattcacgttcgatagattaagaacgaggtagcgattagtgtagaacgggggggttcgttcaagatccgggggaatcgacagtgaatccgggggtggctggccagctggctcgccgacgcgatacgctcgtttcgcaggaccagactcagacgttacccctatctcatatataaaggagttcacttgcgccgtctctggttggcactcgaacacgaacatcactctcaacataccttttgcatctcttcgccattcccccttgatccccccctacaaacaaacctctgcagaccccaccacctccgaaggtcgtggcgaacctgacgaacgttcaattcggacaccttgtcgctcatcttccaccagtgcaatcccattcccatcaacatctaaaccctcatcactacgatgctcctctctctcctctcgatcccccttttgggatcattcctcggcgtttcagcggcaccggctgacaaccacaccttcgaggctcgtcagggcgtcaacaccgggtttccttacggtcaggaaaaggtccgcggtgtcaatctgggcggatggttggtgctaggtacatctcacgtctcctgcatccggcccgagcctagagcaagcttaacctccgatggtctttgtagaaccttttatcaaaccgtccctctttgatcctcttgacgggtcgatcgtggacgagtacacgttcggacagaaccaggatcggggtcaagccgctgctgcgctccgtgcgcactgggactcgtggataacgagggacgactttttccaaatcgccagtgccggcttgagtgagtgtcatgccgtctcccgccccgaacctccctcacgaacactactgactgccgcggtacgtatgtagaccacgtccgattacccatcggttactgggcgtttgtggacgatgcctacccctacatcggcggtcaaaaggaatacctctaccgcgcgatcggttgggctcgggagacgggtctcaaaatcatcatcgacctgcatggtgctcccggatcacagaacgggtttgacaattcgggtcaacggggcgatgccaggtgggcttacaaccagggggatgtcgatcggacgaaacagatcgtcgagagtatcagccgagagttctcggactcgcagtactacggcgttgtcacagctttggtgagcggcgatgccagtcaaccgtaacgtcgacgttcccgctgacccgaattcccccccgtccaacaggccattctcaacgaacccgccggtttcacctcgcccgatttccttgccaccacccgacaattcaccatcgatgcctactacgctgctaggtacccttgggcctcgcagggcaacaacgcccagtccggcttgttgatcatctattccgacgctttccaaccgagtgagtgcggcggggttaggggtttctcgcgtcgaaccgggggtctgacaggcgatgctgcacgataggcaactactggaacggcgttttgagctacccttctgcctccgcggtcgtcctcgacaaccacgtctaccaagtgttctcccccgccgagaaccaacgatcgtggggcgaacacctgacctcggcctgcgactcgggtgggaacctgcgtgcttcgcccaactggccgatcgtgggcgagtggagcttggccgtgtacgactgcgcacgatggttgaacggtcgtggagtgggcgcgaggtacgatgggtcttaccctgggtcgtactacatcggcggttgtggcgagtggaacactggtagtggtcagagcttttccaggtgagtcgaccgagagcttgtcgatccgctaatccgcgtcgcacaaatgctcataaccgctccttctcgcagcgaatacaaggccttccttcgagactactttgacacccaagtgcagacctgggagaacaacggtcaaggttgggtctactggtcctggaagatggaatccgccgccgagtggtcttaccaggccggtctccagggcggatggatcccttacaacccgaccgagcacgtcggttacaagtgttcgtagatcccactccccgtccgtctagctccggcacgtcttgccggcccggtacacctcatcctctagatgcaaagaatcgtccaatgcattgatcgttagcacgcttccccttgactgcatttggcggaatgcacgttcgccatcgccggggagtcgaaagtctgtcttgtcatattattaataccttgtcgaaacgtagctctttcgaaacaccttgtaatcccccaacccaatacacacgaaatgtcacgtcaatatgctaatcaaaaatcgacgtcacggccacccctagccatgactactatgcgattcgaagggtcatcggaccccttgtccaactccaaggctgtgcaggatgacgtctatgaaacgaagcgactgttctccctagcctttcattcctgaaacgatcgaccacagtacttccccctacccgaacaaggaggcaggagaggaatgacgtgccgtgtcgatgacatcattttccctaaagatacgtcattctcgcgtcatttcacgttgcgaggggtcgctggcagtcactgcgccgagcggctccgaggcgcggagccacaggtcgagggcggaatcaaaaaggtggtactagttgtttccgaaatggaccactccgggtcacaacgggagacgagtatataagtcaacaacttctcattaacaacgaccactccccatcacacccagctcgcccgcctttcctcatcacaatcacctcgaatacctttaaatttccccctacctcacaaacacactcgcacgtactcaaaatgtccaacgaaccttcccaactcaacggtcagatcaacagcgtcgtcggttccgtcgagcagatcgccggaaaggtcatcgaggccggtgtaagtcgtcgccgccgttgttatcgcccgctcgacctctgattgacatttgctcgtacttgatggttatcgtcgcagttccaggccgtcggaggatccaccgagcctagcgtcttgaccaaggacggtaaggagaggcacgacaagggagaggccgagatcaaggccgccgaggccaagcagtacgccgagggtaccgctgaccgagtcattggcaagaagggtgagtcgggttcgtggctcgtgcattgtcttcgcgtcggtcgctgatcatctcgatgacttcgggacctgcagacgccatcgtcggtgccatcaccggagactctgcccaggagctcagcggaaacgttcagaaggagaagggtcacgcccagcaaaaggccgcttcgtcctagacgttccgtgtgcttcggttcgaattcccttttttatagtctccgccgcaccatcccgtactgcacatctcagtcatgagaacgactgcccatgatgaatcgataatataccctccatctgaacgaccactcgtcccgctagtgacccctggttacatgcccatgacgaatccaaactcgtcttccagcccatacttgctcatccactctttcacctgccgcatatcacccctattgccgtgcacccctcgctggtcgatgaggtgcgtgatctcttgcatccgatcaaacgctcggtggtcgatcggatggcgtgtccgttcggtgacctagtgacgatgcgcaacgagcgggtcagctctttgcgatcctgcgaccttgacccgccccggccgtgccgaccccgacttgcctttttctgataactcgggatatcgctccaactctcgttcttgatatcgttcatgtacctcccgaaccccgacttggtcccttcgaggcagagcaatcccggtttgccggcgaggacgaacccggtcaggttgtacctcgaagcgtagacgaccaggtctttccgtttcgctggggtcgagagggacgggaaccagaagaatgacctttcgaggggttcgtccgggtcgatatcgacgtctggggtggggagcgatgtcgccgctaagatctctgcacgacgggcgaggaggatttcgaggatcttgggccgggtcaggtcgacggtacgggtgatgaaccctacctcgtcctcgtcctcgtcctcgtcccctgcgtcttccgtgggcatgctgtcgtttcgtatatcgctttggacgccttcgaggtgccgttctatcacgtccacatcggctctgataagatcatccgggacgtcactcaaagtgatcttgatcctgctggaagaagctttcggtggaaagacgatcttgtacccgaccttttcctcggcatgctctacgtgcgctccaccgtctgtgtcgtccatcagaggtattctgagaacaaggacgagttcttgcagatcggcttcgctcgtcgggtcttccagaaccaaggcggtcgaggagctcagggtgagctcgtccggcaaagggtacatcgattggaggatcatgatggtgtccattttgagccgctgtcgtgctcgtcggagaagggctggtcgggggagctgcaaccctgcgagagcgaatatgcctggatagtgtctctggcttgacctgtgtcgaattttacagaggttagcggtatcgagagaaagtcatgggacaaatcgcaatcatgatcgacgatgacgatcgtcgaaagcttgctcaggtcgcggctgccagacccgaaaaagtgcttccggtgagcgattaggtgaacattcggaagcgtcaggaacaccttcttttcgccttgcattgcggcagaacttggtgctcgtagggttggtcgacgcttaacgacgacgacttgagtgactagctgactagttggagccaggtacattctcgaacggcactacaagatggattttgagatgatcagattgacgcgcccggtcacgatcaaaagttcgaaaggatgtttcagatcaggttctcatcaaatcaaaacactactcgagcgaccgtttccctgctcccacgctgtcgaatctcatcaggaacgcgacatagacaatcacgatcacgatgatcaccatcattttgccatcatttgagttccgcttgtttcgatgatgatcacttgattttctttttgttttgatttgcgacgggccctgagcgacggacaagtataaataaagagaggcacgatcggataatcatgtacccgacgagtgacagcttatctgagatatctccacctcatcctactcaattcttccaaagtgatacctttatgaccatgtctatcctcctcgagtctgattcgacgacgcctggggtcctcctcggatggcagcgacaaattcacctacctttatctcctggtgcgagggagcgcaacaagctgcgacaaaccgcgatccctgctccacctctgattccgctggatgtttatgggtaagcgccagttcggatgatcagccgtttcaaacctcgctccaatcatcccgtcgacatctggcacttcatttgtagccctcctccagctcaaagccagattcgatcgaggatcccccctcaatcagccgggtggcagaaagccattgcggaggctcaagaacgtcgtggcatggtcatgacagtgccgaacgcacaaagttttgtctgcctctttgaatacaaacgcgagcaggtttacgctatcggggctgtcgaccttccggtgagcatacaacaatcgccctgcaattggacagtagactgacaaggtctcaccgaacctgcgactcagacgaccttgcagaacgtccgccgtcttttccctgacctccaaacgatcgcgaaccatgacatggagatgtacggtctcgtccccagaattggcacaacctcgatctctgccaatgtggaccttccggagcaaagctccttgtacctcgttacgcatagctcgggcacgcctgaccaagactcgcgtcggactccttccacgagcaagcgacaccaagcattcaagatcaccccctcgctgtatgatgcagtccgaaaccaaatcgctcggcataccccgtcagcgacctcgaaacgcgggtctttgaaagctcctgggatacctcatttcaaaatcgtgacccgcggacacctcggagagagcaccaacaaggtgtgcagctgtaccccgcctgtgcaggatgccactacggctacgagcgcgaatccatcgcgttcgcacttctccacaagccaacagtcgatcgacgccttgcgtgagcttgggccccagtggaagtcccccgagagagagatcaagagtccacccgctacaccgatcaagagcttgacgggcgaccaaatcagcccgccgcctcctttcgtacctttcagcatcgctcggcgtccgacaatcgacccgtttcccagccttcgatccctggtccgaccatctccagcgtcgaaaccccttcaacccaaagcggcgcgcaagaaaacttatcccaggcctgccatgctcccggtgttcgaccgcacgaaccacttgccgggaaagacgatgagcaagaacgagcgcaagctacacatgtcgttacaggcggtgttcgatggacggggcttggcgtgagattttatcgtcttgacaatcgaagatggcagagcttgatgacagaacaactggagaactcgaccgaaaagattcattatgaacaagattgtatccgacgatccttacgaatagcaagttgaataatgtgattgtagttgggaccgcgtaattagcgcacagatgaatcgatagatcccccattcaagtgccccgtttaacgccagtctttgcacagacatctacgttacagacgagcggaaggtgacgttcctcgatcgatcggaagggactcgaggtcgagaccgatgtcgccaccgccctggttgcttggtgctggctgggttgtttaagcgcgcaacgcggatttgaccgaaatcaagaggtcaaaagagtagcgaggtaacaaaagttggatgagggaatgacaacctctcgacttgaattcgaaacccctccagcgtcataccggagcatgacatatagccaaaggaagagtacagtgggtagaccaggatgccaatgatacggttccatcctgcgactcccgggtacgaggttctacggtccatcgcccgaccatccatccgatgtcatcgacggtttacaagcagcgatgctcgagccgcatctctcaagctggacctcacacaatcacacccgctcatccggcgaatagattcggtcgggtcgagtagctctgtggaaaagatcaaggcggaagactttgtctactacccagactttttcaccccaaaggaacaggccgtcctggtgcgtctggcgatgtggaagctggaccgagtggataccaaaaagaagcgaacgggacgacgacgacgatcggtagcagagtcttcagggccgtcgataggtacagaaaaggacacggacctgcagagccttttcgaagatcctaccgtatacgggttcgaagaggtacgtccttgcttgatcgcccatgtccctcctgctcgctcacactccgttcacttcccgcccgacagggacatttcgattcagtgatcacagactatcgagaatcgctcttgaccgcctttcctgaacccagtctggtctcgctcactacctcttacccgcccatcctctcccgcgtatactcgttactccccgcctcacccggctcggacctggcgagagggttgtacgaacggctcgtccttcctgaccagctcggggatcagggtcagggtccggacccgagtctgaacccctgggactcgtttgctgcccccttacagacgactacgcacgcactgcacctctcacctacgggccggatcgaccctcacgtcgacaacgtcgatgcgagcgggagcgtgatcatcggggtctctctcggggctgaacgtgtgttgcgtctagagcgtcgtgttaatgaaggtgaagaggacggacgtcgaggccggaaggatgggtgggaagtcttactcaaaagcgggtccgtttacgtacaaaagtgagtcattatcggcgtcgcgaccgtccatcgtctagactgacactcctgacctccgctcacgctggacgctgcacggtgtgatgggatagggatacgatccggtactcgtacgcgcactcgatcttgccgtactcggacccggcttcgaagggcgcttcgggagaggggttgaagtcgggtcacaggatctcgttgatgatcagggtaagtcggcagttcagttccgagcgagtttgcgggaggatcatgggagggtcggggccgatgcaaaacggtcgagtttgactatgggtagggcggggtggcttggtcgtcagcgctctcgaaacgatctcggacgaggactagatgacgatcgctcgggaagcaagaactcccggaacccgtcgacatctaggcgtccggaggtatcggggcgaggagattctcgttcgcaccgtcgagcgtgacgaggaggatcatcgacttttgtcgaacgagacggctcgtcgatgctgccgagagcgaatcgctaggccgtcaggggtgttcgacacgggaagtcaggagagggatatcggaagctacaatgccgagtaccgagacgcaacctcgcgatgcatgtggttggacgtcgtctcgtcgtcgagaaacttccgacggtcctcgcgctcgaccacctcgacctcgaccctcgaccctcgatcgattccagtgatctgactgaccccctgctcgtccgctgctcgtcgtcgtcggtctgcaatgacacgagctgattccgaatgctctcttcacttcatcgtctttgtcgcttccccgtccgtctctttgccctcttttccaggatgcaaaacccgatttttctgcggctgcggtgggggcggcaccggaggcgggttcgggttaaaagggggtgatgcgcgcgggttaacggttgtcggtcgtcctgtgagggggcacatcacgtaacgcacccgtcgggcggggacatgggctgtggccgagccgatacgagccgagccaggtcgagctggaggacgaccctttttgtacgttaagagtttccctccatccgacccgaacccacggtctcttgcttccatcatctctgaattctacccatatcgttcagtagattaatgtaatatatacttccgataataacgttatttacttccgtgatctctttccctccccgcttgccgcacgcgttgtttcctgttttcggaagtaaatagcaatttgattccgttttctacccgacacccacacccacagggaagatcggtgatctaagccaagagcaagacgatgagatgaggtgaactcgagttgtagtcgtcctggttgaaaggttagcgctatgatttgactcagaggtactggtcactagtcaggtcgtggtggtgagcgtcccggtcgaagtcgtggtcgtggtcgaagtcgtggtcgtgctcgtgggtcatcggtcccttggtggctcacatgctctcgggggcgttggatcggccaccacctctgcttctcacacgctaaggaatcccaagcaacgtcgtcgtcgtcggcctactgccaatcttaatcccaatcctaatcctacaagtcgatggaccacgtcccgctcgtaacagttcatagatggtagtcacatagagtatcatcgatcgtagtcatccattccccggtagtcccgatagaactcgagggggggagtcatcaacgcatcattatcgttccaatttctcgcgatcgaaagcgaaaggaaagtctccgagagagaccgagcccgtgagagctcacgtaacaaagacaacacacacacgacgacctagaccaggggggggggaaactttcaacatactaccacactaccacactaccactatcaaaggaaggagacgacgagcgactggataggaagactcgctgaacatatctttccaccggagcgtccgctttgcacctcgccctgcgaactctagcgagtctatagatcgcgagagttgagcacgcgagaagacacggaaagacggggatctcgacctggacttggactgagggaacacataccatggtcgcccagacgttcgaggtcgagtgttggcggttgacgagttcttcgggctcttcgtcgggcttgggtcgatcgggacaaggcgggcatgggcttgggagtggcagtgggtccgctgcgaggtcgtccaagatcgaggtgagcacgagcgaggccaacttgttccccatcgcggtcgaccgatcgacatccacccaccccacgcctctcctcccttattttgctgccccgatgctgaccccccatccgacatgtccggcttgacgtctccccacaccagacctcgaaatccatccggaacaaactatccatgcctcctctcaaacaccgttcggcttcacatagtagtaccaagagcgtcaccacggggtcgacccacgtcattaccgagtcgaacgggcgatcctccgatctgacgaaggaagaggacgaacggggggatacgttcggggcggtcgctgggttggggatcgccatggggagttcgggtacgagtgcgagtgggagtacgggggagtctagacggaaaggtgagcatactcgtctcacctctgcttagaagacttttacgacaccgaccttgtcgacgaggtcacgaacttgatcgcttataccacccctctcctcgtcggtctgagtagaacacgggcacggaaacatcttccgcaggtttgctagtcgaaataggacaccttcctcttcctcgacgacgacgacgccgactccagcgggagcgactttcgaatcgttgcctcagagttcgacattcacctcgctatctactctcatctccccctcgtccgattcgttcggttccgacgtccaggccgtacagggaaagcacagtcgcccgagaactcgtatcaacctcgacgatcccgttccttcctcctcccgaggctcagagtcaaaggatcgtcgtcgatcgaaatctaccaaagacgcatcgcacacccaagggtcctcggaagagggttcgtccggtcgggaatgggtacgggtcagggtggtcctcagcgggaatatgggcgtggggcctaatagcgggttggcaggggcgcagaggagatcatctgccgctgcgactgccgctggaaatggggcgggaaccaccggcggatcgatcggaggaatggggtcggggtcaggcgtcagagtcgaggtgtttgatgtaagtcttactcgttcatgatcttcggtagcaggttcgcgctagacagagctgaaccacatttgaacgttgttgcaggcctcgactttggacaatcgccccctcttctcgtttgaccctaccgtgctacgatcgacggatatttgtctccctcataaatccctgtttccctcgcgggcggacaaggtcatccggctcaccaacctgaccaaaccttcctcgacgagcatcttcggtggcccgcccatcgggatgggaccggtaggatgggatgttcccgacggtgatgccggggcgatgggtcgcaagacgggcaaaaaggatcgatcgaccgcgctcgacctaggcaaacgttcgcccgcaacgaccgacgcttccccttcggcctcgacgtccggttcgtcttcggatcactggaccaccccgatgatgagccccggatcgttcgattcgtccggtcgaacgtttggcaagcatgtcgctctgccaagcaggatgcatgattcccccgtgtcgcccacctttgggttgccttcgagcgagaccatccgggatttggcacaatcacggcgtttacaggagcaagaagcgctcggtcggagacatggagccgtaccaccacctccaccacgctcgcccgtcttgtggtacggtaccgatacgcctgcggggcggttccggacgacccgatcgagagcgagtaactcctcactcaggaccaatacgacgtccgattcggacgacagctggaggtcggcgaccgatgtgccagttttgccgtcgagctcgcccgtttcgaccaacttttactggacaagagttgaagtcgacagagacgttccgtctgtggagaacggcgggcaagcaacgacgaccacgagcaaaacgcagaagcgggaatcgatgacgcctcgcgcgaatcgggtgttgcaattcccagatcgagattcggacggcttggaactcgttgacgatcccatagacgagggtgaggtacccaacgacctcttgcttacgttcgggacacagagcgaaacgcaccattggttcgccctgctcaagagtttcacgagcaacgactatattaccctcgtctcgggcaacgacatggcgaccaacttgacccgaagcgattcgagaccaaccccatcgctctacgcggcgttctccgcgaacggtactggtagcagagccgagtgggctcgaatatggcgctcgctcgaaatcaagattcaggatgtcaaggatctgaatttggcctgtgctaccgggaccaccgagctcaacggcttagctagcgctcgaccggttccagcgagacgcgggatgttgaggagcatctcgagcggctttgggcagacgctcaaggggctcatggacgacgaggacgcgaggcagaaacaggaggatactttgtattggagcgtgtgagttgttggtccgatcgagatcaaacgtccacgcgatctgacctgctcgactttgtgtggacacagctcggtggacgggcagaccatggccaggacacccaaaagacgggttgatacgacggtctggaccgaggtcctcaagctcgaggatatcgaggaatggcacaagtgcagtgagttgataacttccagccgtgaatcccgctattgtcgctcaagcctggccgaattagctctgcgtctataccgccgcacacgcttttcggggcaaccggccgagaccatctgcctcgggtacgttcgtgtcgatgcgagagatctcgctggtgaccaaacgtgcgagaagaaactgccgctgctggcctttcttacatcggacgtgctgggccaagtccgcctgtccatcaagtccgaccagctgaacattaaaggtttggcagcgtacgatgcgatcaccgatgtacgtgtataggcctcgaagacacacacactggtcttgtcctgacggctctaatgattacaggcgattcaatcgggcgatgccaaacgtatgtacaaggtggcggaaaacgcgtccgcagagggtggcgccgcagctttgtgcaggatcgccatgtccaaagggttactcgaacctcttgtgtgcgctctcatcgatgaagaagtgcagacacgtaagtagcgtcgattttcaaggccgaaccacttgagctgaacccgtcccgttccgcagcgtcggcgacgttgtttcggtcgaacactcccctcactcgatgtctagagtacgtcatgcggattcaagcgatcgactacgtgcgggaaacgattggcgaggaaatgagagcattgtgcagcgagactctggccgattcgccccgaattggtggcattctcgacgtctcggtggccgtcagcaggatttgggacaagatttacagcgagtcgctccgtctctttgagctttcgtaaaccccctcacgctgacacgacactcgatctcgcagtgtctcgtcacgaatttcctcggtgagcgcagcgttcagcatgcagaataggatcacagaattccagctgatccgctgaatttacctcacagaaatttgcgttggctgttttgttatctcctgaaagcggtggctcggcaccatcccaacaacaagtgggtcctcgcggacgtcagatggtgctcgacaacgcgctgactgtagcactgagatagaccgcttcaactgcattctgtctcggcctttgttttcgtgagtgactgacgataaacacagggagatgtccgcaagtcaacccaagttccgtcctctgccacagctgcgcctgatcggaccatgcatcatgtggccagagacgtttgggattgtagattgtgaggaggaacttttttgcggcctgattgacagaaacggacgctgacgatcacccctgcaatcagtccatccgcgagaggaagtcgagcaaagactcaaggcgatcgccaagccgctcatcaacctgggtttcttgactgagcccaaggaaggcgatcgctcaccgatggaagctcagttctccggtgatttccatcgggtaggtcgacgtgcgagcatctccagcgtgatccgagctaaacacgaccgtatggaacaggacaatgtctcggcgatgatggactacctggcttgttgtgctgtatgtcaatgctagagcgacttgaaccggccggcgctttcagtgcgactgacccagctatcaatccgacagagctacgattcgccaccgatctcccaccaaagcgaaggcgacgttggcctgcagagggccttggagacccgtcgatctgctttgatgccatcccataccgatagcgaggctgtcctacacgtcacccgccagctcttggtcgacgtggccaaggacgctgcgtggctttaccggatccgtcagcaaaagagcgaggcggaagctcgaagggattcgacgacatcgggcatgcaaaagatgcgcaccgtctcaatcacatcgagccagtctggacagtcgatatcgattggatccagtccaatcagcaggacttcgtcgtgagtggccgacctgagatgagacgacgcgtttgtaccaagctgattttgacggcaactgtcagtcttcctcccaccaacgaagacggatcaagtccgcccgaaccacccaggcgtaaatcacgacgaccaggatcttccaatcgaccggttcttgtcggacctcctcccgttataggccaacggacgagcagtatgagtcgacaggcggccaacatggtctccttaggacaacccatataatccatcccattgcatagtgctgcctcatgctgatgcccgcacgatttacgacgcctctctgttacgacacgttcatgaccttttaccatacgatgtgtttgtaaatgtagacactctttgcagagcaaagctgtccactgacaattgattttgaatgatccttggcttctggattgaatgaggcaaggtattttgtttactttgtcgaatatgcgctccgagtgtcctcgattgtttagtggcgtcatccccgggacgtcgctcagacgggaatcatccccacgaattggtcaactgcatccatcccaataatgtcggacgtctcgattcagactggttacagaagaaagactttgttggttccccgtcttgccagcttgtgatacctctaaacccctgttcgatatggatacccctacccccgcctccaagagcaagaacgaccgcttgacgcttctcataccccggcccagttcagcgcccgctcactgtataagcgtgaatagcccaggcagggtcagtcgtctctgatatgcttcgagactcgcacaagctgaatggctaatttgcctcgatacgtagcctaaacacaatacgatccccgaaccggatgacgatattccgtgcagattcgagattgatgacaagcttatcaccggcaagttgaggaggtcctttgaggtgaatttttactcctcacactcatttttgctatatgttcgcaactgatggctcccgcctcttcagaccacgatccaaaccctcgtacagcgaggtaaactcgagagagccttggcaaactgtgtttgcacttccatcatcataggaggtcctaccagggcaactgctgactcaaacaccgggtctaccgcagaatcgagggcatccgacggagcctcagaatccgaggccgctacggaagccatgatagatgccgattcctggcatgtcctcagacattacgctaggaaaaagtttcaatccagcggagacctgatgatcgtgcaggtcagtcatcttgatgatgtgactttccattccggcacggccagagattcgacatctcgatggctttcaagggtcaacaacgaagcaggttcgaccgcctcgtcttctccgaaactcgtctacctcaacgctagccctcggatgatcactattaatccagaatcgatcgcctacgatgacgatcataacaacgacgacgaggagctcactctggaccacggcccggatgagcacgtcgatgccgagaccgaatccatcaccaacgacattttcatctgtatcggatgcacgcatcatttcgacatgtcctgtagcgtcaacattgacgagcttgaacacatctcgtcgcagtcccgcagggaaggcgaagaggcgggatggttctgctacgggtgtctctccgaggcgtacggggctttacgggagcggatggaagagatgaggaccgctatgcaggagaacagggtgcaagtcgacgtggaagaggtggacgagtcggaaaataccgtggtagatctcgctcaagaggatgaagagctagagatcagccactcggatatcgatccagactacaaggatgaaaaggataccacgcggtcacccggtggaagcgatatcactctgactggtactcccgaggagatgtcgccatatatggactggatatccttacaagatacattctcggtggaactcgctcgcttggccaggtggacgggtgaaacggggctggaatcgccgaacaaggaagcgaaacaagtggaagatcaaatgatgacctttcgtctggaattgatgatcatcatgtcgagtgagttcggtcctacgctttgaaccgcactatctttgattccaatgtcaccaatcaggcgatgatatgttctcgaatcgacttgtcaagaccctagggagactggctttgcatctcgaacaacacgccgagcttctagtcgagcgtcctcgcctctggttagacatcttgtcggtctgtccagctcctcgactggggatggcgatgttggtcatcgacgccacgtccagattgaatgacatggtcgagtctctcttgactgccatcgactttcaccacgaggtggaactcgcccgagcaacccgggttcgccttgaagacacattcactcaactttctcgtagcaagttatccctgaaccgcttgcgtacggcatcgacacaatccatcgtattgaccgttagacgcatttaccatcgaaagctgcgtttggctatgagcgctattatcgatacggttcgttggatttgggaagatgacgggacttcgaagagagagttgaaggccgttcggccggccatggcgaagattgtgcagacggcgatggatatcgtctggatcattgaggaaacggattatctcaagactggccacaaggaagatggacagagacttcgaaacactaccggtcatttgttggacaggctcctcgaaagcatcgactcgcaaatcgcggagcgacccacgactgcggtatcgatgcgagcgcggtatagctctccagctcttctcacacccactcgaacagtctctcgatttaaacagaccctggtgtcctctccgcgttctacacaacctggccatttcaccgaaaagatgcaggatatcgagcgagaggcccatcgactcgtccgacccgtatgttcggtctaccagagtccggtcaccgcatcttcccacttcggccgtagtcgaacccctgcggatgagatccctagcaccttgttgtggaagaagaccccagtcgagtgtatctcgccccggacgatggagcgggcgctgaggaggagtcgagctttggtccgggagacgtccgtcttgcgggagtccacgcgagtcaagaggatgtcagaggcgtagcgaggttgatccttttttttacggaaaggactgtaagctcccatcccggacattgctcttattgcgttgttcgtagcaagctgatgatccatggtcgatttgggggtcttgacgaccttgaagaggaatcaatcgctcgacatccgcgcgatcgacatgaaacgccgaatcagcgagatgagatatcgacctctgctgattggctagcacccgtacattctcttgtgagacgggagttgttttccgttggactagactgtgttcgtcgatcctcgggttgatattggccgtcatgactacaagtatctgagtcaattgtcatgacatgcatatactgtgattctgcgccggttacttcggtcaaagatgcccgttccccagtctttgaaattacggcatcctcgtcgtcttcgtcatatcatccatcgtcgtcgttcagcttcgatccgatgcatcggatggatcaggttatacagctaaccctttcgtactctacctaccacggccttgaccgtgtaattgaataagcctctgtgtcacttcatctcccctggtgactggacttgaaaccatcaaacgacatcggttgaaaatggcccctaccgaagccttcagctcggtctcgtcatcgatcagttccatcttctcggtcatcccccctcgacacatcgccttcattttactcgcctatggaacctttatcgtcctcaatcgatactttattcaaccgaggacatcaagcatcaggaacttggccgggcctagcaggacggaggattggaacccctgggtcggtcatctgaggcccatcatcaagggtctacccggcgaggcgacggcgaaatggatcgagcagttcgggaccgtatttcgtgagtctcgtagcagagcacaatcccgacgtctgctgaaccgacgtcaacatcggtatatcatttgtaggttacgaagccatcttcggggtaggtcgacgtgcgatctgaaacatgattgccgaacaaccggctaactctagagtatgaccggtcattgctacaggcaccccgtatcatggtggccgatcccgtcgccatccagtacatcctacaacacacggaaatcttccaaaaggatgacatgacccgtcgattcttgcgtcggatcctgggcgaagggttgttgaacgtcgaaggtgccgaccatagacggcaacgcaaggtcatgaacccgtaagttcagatacggcgtcatgacagtatgtcgaacctacagacgaaagctcaactaggggacttttgatatgggggtagtgctttcggaccccaattgatcagggatcatcacttgccgatcttctacgacaaggcgtatcaggcaagtcgaccacgacatcgaaatctctaaaccactcctttctaaccccgatctcccgcccttggtatccatatagctgcgtgacgtgctgcaagacaaactctcttccccactcccaggccctcaaccgtcttccccggaaaagggtcaacgactggaaatctcccgtctgttgggcaagacgacgctcgacgtgatcggtctcgccgggttcgggtacgatttcgattcgttgcatcatccggacaacgagctcgccctcgcgttggagatgatgttatcggccggtcaggtgagatcccggtttttcgcgggtcgggcccggatgtgaccgggtagtcatgaatttggaaagctgacgaggatgcgcggtcgtagaacccatcgcccttgcacatcctccaggaaatcttgcctggtgggaggttcctggtaagtgattatcaacttcaactgccctatcgacgacgctaacagagtccatcctacggcatacagccctccaagcgtcttgctacccaagaagctagtctaaagaccactcatcggatcggcaaggcgagttcaggagacaggtcgtaaggcgtgcaagtactaaccaagtctatccttccgagcaggccttggtcgaagagaagaaggctgctgtccgggctggagaggccagtatcgagaagggcaagggcaaggatttgttgtccatggtcggtaagtcccgtattccaaaggcatatcatgcgggtcccgcacttgacgtcgatttcgtctcgtagttcgagcgaacatggaccccgatcttaaagaaaaccaacggatgtccgatgccgagggtcagtacatgatcgccagcagaaatgtatgcgatcctccgaattgagactcgaaaacttgtctccagtcatcgccacgatccagacctttgttttggccggagccgagacctcgagtaccgcattgacatgggcttcgtgggtcttggcttgtcgatctgacgtccaggacaagcttcgagaggaatgcgaggctgtacccgaagagcaaccttcgatgtgagtcggcacagagcagctcccagacgacatggcgattgaccttgcgcatggacgcgacgtagggccgatctagatggcttgccatacctcgacgctttcgtacatgaaatactgcgaatctattcgcccgtacctcaaactcgacgagacgccatcgctgagaccgtcgttcctcttggacaccccatgaagggtcgcgatggcaagatgatcgagagcattgtcgtgcccaagggcatgccttgcatgctcggtaagcccaggtacactgaccgatcccttccgtgctatgctcacatgttgaccctccatccagccgttctcaacgtcaacacctccaaggatatttggggccccgacgcggccgagttcaagtgagttagaggaatgacttggcggtcgatcgggattgaacctgactatgtcttttgcaccaggcccgagaggtggttgaacaaggagcagcacccggcttccgagagcatccctggcgtttggggcagtcaaatgacctttatcggtgagtcaccgcggtcctgaaatttgtgtacgacctgttcaccggctgaaccttgtgttttcatgaacctttgcaggtggacctcgagcttgcatgtgagtactcgatttctatcaagagttgactagtactctgagctgatgcaatgcccgccctttctgtttcagtggcttccgattttctctgatcgaggtcaaggcgttgctcttcatgttgatccgcaactttgcctttgccgaggccgtcccgaccgaaaacgtcattcgcaagacttcgatcgtgaccaggccgttcatcaagggagaagaagaggctggctaccagatgcccatcctcttgcgatcgctggcatgaaagcttcacgactctgtgacaaacaaggcaaggcttacaaatacgtaaaaaagatagcgacgagttgtacgatctttgtattatcatctagtccgctcgaaatttgctacatatgacacacgcacacacacacacgcgtttgataatctggcttccaagccttacacaattcggaactcgggtccctctgcatccctcagtccgcctatcccaagaccttcttcaaaccgtccttctgagagtccgacaaggaacgagggaagacgacgttccacttgacgacgaggtcgccgacctttttcggcgatgatgctcgggtgatggggaatccctcgcctgccactcgggtctcctggttcggggtgatgacctgtcgagcacacagtcaaagggtgatcagctgacagcgtctcatggaacgcagaaccggactggctgaactcactcccttgggcaggttgaccttgatctttcgcccatctagatgttccacctctctcgttccctcgtttgtccccgtcaaggcgtccaacagcgagacgttcaagctgaccaccaagtcgtcgtcctccctcgtgaacctgccgtggggtttctcctcgacgacaaagacgatggtctgaccgcggccgtattcatcctcgtgcccggcgccttggaatttaaccttggtcccctttttccacccggccttgtaggcgatctcgaggactttgccttcttccgacccgttctggcgtttcctggtgattttcagacgtttcgtacctcccttgtacagttcctcgagagtaagggcgagcggacgggtgatctctgctaccggggcaggaggagccgaagattcttgacgttgaggaccggctcgtcttcgtcctccaggtccaccgggcatgcctccgaacccaccacccccgaacatatcctcgtggcctcccataccgcagggtgggcagcagagacacacacagaaagacaggggcagggcaggcgaagagagggagggccagacctacaggaacgcgggttacactgtcgatgccgtcatagtcagccaccgttgcattccgtgtgatgcgcgcggaagagacggacaaaccctcatcagaaagaaagatgggatgggtgaatgcctgatgacggcgaagcgaggtagcggagaggtggaaaccccgggttggatctcgactcgcttcctaccgcaccattgtcacaactctgcaatcctttcacctcgtcgccttctccaacacctatcccccctccccttttggtgtcgaaaaaatcgtaaccggaactcacgagaacgcgagcgcgagaacgtggttggaatctgtcaaaccgcgcgcgcgagccagcgtcatttccccctacgtcggtggcgtaacaggggttttcgtcttaccgaaggcgaacctggattcccctaccgagctttggctaggctcgaactcgtccggacgtccaagtctctcgctctctcgattgtcaatactggttactacggtcacgaaggcatgagcagtcggtagttgacagctggcacctcatagtcccaccgaccgactggcactgacttgacttgacctgctgtcacggctaccaaactgctgacttgctctgcgccgtcttaaaacggcgagacgttcgattagggcagaggtcttattcgagccggcaggtcgaaccacgacactggggcgcagcgctattgtccctgttacctcccaccgagattctagtcaagacttcttaccagatcataaggcaatcccatgacgagcctctatcttgtatcagtcgacctcctttcttcgcctctgacatcgtattcgatctgatcgtcgcttgcgtaggtcatctcgtcgcctcgggacggacaagatcgtctagatcgtagacccttcccagccttttcgactatcaagtatcaataggctatgctccgtctcgtcatatccccgttcttccgtcccgatacaaggctctacaaagaacgctacgatctcgtcgtctcgtatccttacatgatcgtcgcgctcccataagccgtccccgcgaggccacgacagacgagcgcgaaatcgttcagagcttctcggattcgtttcggcgtacgagcgctgcgaggaagttccggcaagtcgaggggtcagagagtatcagatgggatcaagtcagcatgacgaggccgagacctcgaagccttcatgaggaagtttcgaaagcgagacttaccgcatcatcgtttcctggaactttttcttcgatgccgggtcggcttgacctccagggaatccgggctatcaagcgaggtcacgtctgatcagcctcccttattgcccctcaagttgcgccgcagacttacatcacgtaacatggccgtcaaccaatccctcgtctcgttcggcactcgttgaaccagggctaccatcagttcggcgtaattcgggatggtcgatcgagggctcgtcaacgctgcaccgagtacgctcgaatacagaatcgactgcccgtgcgcctggatgacaggtaggtaggcttccgcaagagcttggggggcgtgccgagacgtgttcaacatcgagacctgtagaggtattcggcattcgcgtgctaagccgacaagattcggcctatgcgataggactgaaacatgtgtacgcacaaagaattcgatggcccctcggagagtaaattgttcggtagcgctcagagccaagattgccatgctcatagaagcggattgactctccggagtagtcttgagaaaggcggcagggtatttcgagatgacctacaacgccagggcgattagctcaaggaatcgacggtagcgtgtatttagacttgcagctgaagcaaacttgaaaaagctttccgcgatatccggattctgaatggcgatccgaagtcagcttatcgacttcggtcaatatcgacaactagccaggtaactcgcctcttgcatgcttcgtgaatctttcaacttgtctgcagtcgcccaagtcaaggcagccaatgttcctgccaccgtaccatccaactcatccttggccgtcttttcccgctgttcttcgctctccatcggatcgacaggtccgtgtaggtgtagtgccagtttctgccgtataccggagagcggcgccattcgccagatcagtgtggccgcagtgttcggccagatcgaaaggtaatttcgctgagctgccgttgagatgaggtagagcaggggcgcgatgggtagtgacagcagcgtgacggttgaaggtgatgctgtagaggctttcatgaatccgttgatggcctgagggcaaggttcaataccagagcacgagttgcgatgatacctcatgactcaccgacgcaacctcgacatcggcaccccagatttcaatcacttttgacacggtctgtagaattccttcacggagcctgactagtcgttcgtcttgtctgcacgtctcgagcgctcggctggtcgtggccgtttcttccggttccaaatcgaacatgtcttcatccgagggcgtcaagccgttggcgcaagccgtcaaagtctcaagttgttgcatggctatcgtccttgctgcctcaggtgcctgtgaccatggtcgaatgcccttattaggcgaagccgtacgatcagggtcattcatcgtgatgcactcacttgcccgactgcgtgaacgcattgctccagcctatccagcactggctgggtgatcgtctgcgagcgaaacgtcggtaaatttaggagaaagaacaggcgtgatccaatcgacacactaaaatcggacccatagcttctgcaggaggaatcgcttgcaaaacactggcgatagcctccgtgaccctgacctgttcctcgggctggacgaaatgtcgtgctactcagcaatgcatcatcaatttgacgtcgatacgtaacttacccccatgctagcaaccttgccatgtagctgtccgaatgaggctacgtgagccgtgagattcccgcggcaaatatcgcaaagagatttcaaagctagcgcggcctccgatgctagtgagcggtcgtctagtgaggtgaccaggtagtccaaggcgagcacgacgtggtcgctatggtacttgaaccactcttcgtatgagcctgagttgctctgtgtcagccgcagtacggtatgtgactcggtctggtaatctgtactgacggatcatgcgtattgtggccagaggtatccgatgagcctctcctgtcggtaaccgagaaaatacatcggcgctgaagactagcgggagcgtagtttcttctcctagaggcacggcctcggaaacgaatctgatgcaatgcagtgtggcctccacctcctaatgtcagttcgggggagacgatgttagttcagtctagattcatcagcgtccacccatcaactcgcctgccatgtcgcttccgaagcctctttcagctgatcgacgagcacgtgcaacaactccctcagcagatcgtcccgcaagacataaaacctttgcgagcacccttataagcttcgtatggctggctgagtatagctcacgatactcacgctgtgatcatgacctcccccgcatctcgtcgatatacctcaaaagcagccaactcctccgcactaagtgccgtcactggccactgcactttctgtcgtatacgggaaacaacctccctaaagaaatgcttcgaaacgttctggacttcaaggctctcgctcgtatctggctctcctagatccatgatcgactcttgtatcgtcgaatagaggttcaacgtcgtctgtagcggagcaggcgagtcagcatccggactgagtcaaagtcgagcttgatgacctacttcgctgatattttcgtcgcggcctggaactcccgggaatcctgtaagctcgatcaggacaccaaagaacgcctggacccgagggtcattcgttcgacgagccatccagtctgaggaatgttccaccaaggcatccaccaacttggtcatcctgatcacgtcctcagaatctggatcctcatctgatcacattgaaaagggtgtttcagcttgcaagacgcggacgtccgaatatggtggtggttgggtactgactcgcggcagcctgtttgacaatcgctccccctcgctgcataatccattctagtattggctccgtggtgatctttgttgccttgccatccttgaagactgatccggtcaagatctctactagtacaccgatgctctgagccatatgcggagtattcaacagcccaagtagagttggcaagaggttggtgatttccctagaatagctcaggtttagacctcggaactatggtgacaccgcgcgctggaagcagtggtttgggacctactcggacgtcaatccccattcgacgtatgcttccaagcacttgaatgcagcttcaacttctcgcggatccgagccggaggcggtcaacgtctcgaccacggtcccgagcacaagcgggatttccttggagatggcagaagacaacttggacctgggcccggttcagctacatgcgtcacgaatgaacgcatgtaaaggactcactttctgggctctactaacgctcctcgttgaacgtccctgattgcgatctctaaccactcgaagattaaggatcgagagacacgatgcccagcgagagtcgtaagcacttgtaatagagggttttgccactgttcgggagtcagccgtagaatcagactggcgagctgatacgaacaacggtataagtgtcgtaagaaggccaagactgaactgagattgaacgcaatgcgacttacagagctgaacagctttctaaggacgatgctgttctcgttttgataaggggaatcgggcgatgccgcttggcttgtcaaatccaacgtctgttgaagcagtactggttgtaaatcctgcggtagagtctccctgaggtatctttgggtcagctgcgatcggaacgggctgtcatctcgatgcaggagcattcaccaaaacctggatatcttgatgtgtgtgttttgagcaccagaaaacctcacgaccgcgttctaaaacattcataccgcaatcagtgggtttcccatggcacgccactcaggtttcttacaggatgctgcagcaatccctctgtcagaccccatgcttgatctgactcaaagacaactaggagttccttctgtatcgcttgagctagctcagggtttcctgacgtttctggtgcatgcaagcgaaggatcatctgaaattcaagtatatcagaatctaaagcagagatccgaatcaaggggacttaccgtcgcgacctgatctaggtcgctctgcgagactaccggcatttgtagagtcatgttcacgatccctgacgaaatcgaaattgacacttggtcaattcgagtcacgatatgccttgtctttcctgtatttcgagagccttcaatatgtcctgagaatccgatcaaggcacattcttagctcgaggatgaatcctttgtaacaagctggatcttcaagttctccaatataccaggtcctcgaatcgaggtccgagtgacaaaagcaacaatcgaggtcaagtcgcttgccgtaagaacgttcggaagcagaattacggaagtaaatgctactgctcacatccggaccgttcgcgcacgatttgagcgagatgtgtgcctttgatgacttgtagcttgtagagctttattgcacttcgcaattgtcgatacaatgatctggggacattcatcactctaaccgtgtggtagagctactcaagaagctcacagagcatctatatgtaacggcttttcaagtgggacctgatctagccttgtaaagtcaaagctccgcccgctcactaaaacctcaccggatcccggaccaagcagcaacgcagtgcgaactaagctagaattgaactgccttcggatcggcagaaacttcaaccgatgccatgatcctgtctcaaacttcttctcaggggagacgtactgctgaaagtcacggtatgaccgtaccattgtgtcccggtcacggccaggcaggaaaaaggattatcagcaagacagcgaccaataatggcagggcgttctattcttgcagttggaaaaaggaatcttgcgacttctttcgtacgtcaaaaggctttctcaatgtttcagcgcaccgtggagctgagaaagcaaattacagagtgggaggacaagctacccggatatcgtgcggacgctgcttcagcagaggcagcggtgtcaccttccagcaatcaagctcgacaaacgacacgttctgagtctgcgacacaacagccatcatcctctcgagtctcagcggcatctgtttcgtctactggatccaggataggaacaacctcctcatctatcggcgctcaggccggtgcagtcataggccacggtcgaatccatcgcagtgctgcagtcagaaagtctccggcaaccccagaagtcatttctgaaccggttgcgacctctacggaaaataatgacgcatcgaataacacgccagtacctcgagtcacgaggagctggaactccgcccgtcaacgtcatttggctcaacgcagcgccaaagcctcagccgcaatgaagagtgaaagcaccccagcacgtcctgtgacccgatccggtcctacaccgttgaagagggagcgtgcacctacttcctccctcccgcctccttctgtgagctcggtacagcaagtggagcttgatgggagtagtggatcatcaaccccggctgagatcagtgatcagccgcaaatcggctcaggggtcgatgtcactcaaggatctgttcaggatacacctgcagccgattggaacctgccctcgatcaccgcacagcttactcaagtgatcagtacgatcgctacaacattggggattccaacgccgctgcccgctcagacttcctcaacctcgtcattggtagcatccacgtcaaagcgctcaattgatgcggcaggtgacttgtcccaaaacggttctgcaaatcccccaccgggtaagcgtcctcgtgtccagcaacagctatatcaaagctttcagcaatcgccgggcacaacccccggtccacctagaaatcagacaaaatttcgagttgggcacacttcgcccatagaatggcagtatctctcggagggaggagccaacgttgtcttgctctattcgggatccgacccagtattcgcagggaaagctttgcggatcagaaagcaaagcggagtcgcaagccgagatgagcaattcaccaacgactactggcacgaccggctgcttcccggagtccttgagtcgatcgaggtaggggctcagaagtatttgccggctatcgatcgagtgaaggttgacgccagatggatcaaaacactggactcctttatatggcggcatcgaccagaggcccgtcgtcaagttcccggttcccacttggaatccaagccagagacatcacttgtcgtcgtgactgaaaatctcatcggcggtgtaggtcaactggccatcgaaatcaagcctaagacgggatttgtgccggaggctcgcgggctagatccgcgttactcagcgataaaaacctcggtctgcaagtattgcttgaagcgtgctacccaatcaccaccgggcaccaaatgcaggtacggattctgccctattgacctctacagtgatcaatatggagcacgctcgcgagcgttggactgcctcgcagagtcgtggagagcgggaactgcaggcaataacatgagggtttttgttaacgggcagctactcgacaccagcgttcctccgatcgattcccatgtggtaggcgactatcgagatcctgcatctctggcagtcttgatggagaccgctttgtggtccagcgatatattgaggatcctatgtcaagcacagaagtgcttcgatctcgtcgacatccaggctatcggaaacatgttggaacgtcgaaatagggatccggctggtccattcacagccgatctgacacgaccagtggaaatcgaagacataacacaggtgtgccaggaccgttttcgacgtgatgctgccggtcggctcggcggtgcacacccgttgcaacattcgggaggcatacgcagtcaatgcgtgggcatggcgctagcggctattgtcaaagactgctctatcatcctgcgttggaacgtttctaacttgacaggacgtcccggaagcaacaaggcatcagtctggctggtcgatttggatctcaaacctatctcgaacctgaacaagtggtggaaacaggaccaagcgctttgccaagcggtacgcgaccgaggtctggccataccttgcagtgctggaggtacccgccccgttggaccagagaaaattgtcttcccccgaccaagcgatcttgacacggctcgtgcggattagatgcaagcattggcggccgaatactgtcggctcgaccaacaattcgtcagagcgcaaaatgagacgactcagctcagacagcgaaacagtgagatagaaaggacactgaatatgatcaggcgacaattggattctgtaggctatcattagggcccgtcaaagtagccgagctttgtgatgtacaggtattagaggtgtgatgatgattcactgcgaagctcatatattttcgcgattcgcgggccacgtagaagcgcgttgcgtacaagcgcgtccgagcggttcccggagacgatgatatcgctgctcaaggatatcatcacgtatccgtcgtgttgtcccattgatcaatccgcatcgaacactagcaagcggccaaagcaaaccaagatcgtatagccagatcacccaaaatgaggtacattcgtctcgaaacggcttcggcgaggagacctgcgctgatgcctgccgtgttatcagtcaactcgccaatatgagcaagtcggacatggacgagggtcagatcaaggagttggaggagcagcagatctctcagggtcccctttcggtcctacaacaaagtgtcaggaacaacacgcaggtcttgatcagtttgaggaacaacaagaagttgctggcaagagtgaaggcattcgacaggcacgcgaacatggtaagtgcaactatatctccccattgggcattggtgcggggcagcaagcaacagagacgacaggagatcgaaagcagaccatttccattcttcatgacatctcgtgggatatccttcttgatcaccggctgcctgtctgccgggacgtgcacccggtcttgatctatggtatcttccccattttcaatcgatcgaaactaattctatatgctgtctcttaggttttggagaacgttaaagaggtacggcttcctgattcgacgttattatcctcacgagactgaaccttaacactgtacaacagatgtggaccgaggtaccgaagggcaagggaaagaagccggtcaacaaggaccgattcatctcgtgagtcgcagcatctccctcaacattcatggcgaaactcagcacttccgttcgtctgcacaggaaaatgttcctgcgcggtgattccgtgattctgggtaggtcgatcctctgtcaagtctcacatgcggaccggctgacaactgcatttctcaattttagtgcttcgtaacgccgcataagcatgaattgtgactatcatggccttgtattactctttacgatttcgaccttcactcgtctgttctgaccaggcgagaaatgcatatcgaaccgcatgcgaagcacatcgggtcctgcgggtatgggcactcgtcggttcatctcttctactacatatcctgctcttgcttctgtatatcgcctagattcacccgtacacggaaactgaaggttttccaggtcgtagatgagtcctgttcgtttgacgatccgaccggtgctgattcagacgcagactccgcctgggactcccctgcttgatacataaagtcgacatctaggtcaaactgagattgacgagtcagtatagtgagggtcgcgctgatctcctctcgactcacttgcaaagtcgtcatcgcgaggtcaccgacgtgagcccagaacggcactttcgtaacgttccccttccgttccacgcctattcgccctggtctgccctggccggaagaacggattcgagcttgttcatcggtaccatccgcttctagctcccacggctcggcaaaggcgcccaactcgaagctagtatcctgcagcgagatcctcagctgagacaccggttgaaccggtcggacgacgagcttgatcgctgtagcttccaagagagggttcgtgaaagccagttggtaggcgtacttcgatgcaaaggaggtgagctggttgtcttatcaaagggcatcagacgcgacccgtactcacggtcgtgtccgtgaccagcgatacatgtagtccctccttctcctccgctaagcctttactggaacccaagccggacgctcgtcgtatgcttacgattccggacccccctagagagcggtcgaccaattttcttctgttgcccagttcgatcgctgggatgtaggtcgatgccaacgtcttgattttccatcgaagactctgggctttagattcaggccggatcaaagtccggttacaagctgtacaccgtttcgacattttggcacggaggggtactctttctgggatcagctggtcgagcgaggtagctggcgcgaagggcatgtcccatgtaacagtcaagggcgcggggagcttttgtgaagcatttatgtcgagtccatcgaatcgtctcaagcaagctatagtctcatcctcgggtccagctcccgtcaacccctccgaggtacctagacgcctttctgcctcttctacgcagctccgttgggacaaatagtttggtgggtcctcgcttttcggcattgcaagaaattttggcttctttggcttgatcttgtcctcggttttggtaaagaacctcgactcgctgaccttgcgagctgcaagtttcgccgcaatcgccgccgctgctgtgttccgtgaaggctgtctcttgccgagccctgccagagctacatgtttgtctggctgcacagcttcgccggccccagttccgagagccattcgaagggtgtgtagatatttgtcgaagtggctttgaagtgcttcatactcggccgtctctggattgtgcttttcccgatccagaacctggtctacataagggagagcgcatgctcagctaaggcgtaacgtgattgagactgagacatacggcctatcccgctagatttgggaaatacccatttcgatcccagttccgaactattccatcgacaagaggggcactgtagcccgtatgtcggtgcggcttcggtctcgcccttcagcgtctccacaacggttaccgtcagtaccgctgtacatgccggaatggggcactggaagcaattccttgcgcaactattggcgatcatcaacaacacgtttatattccaggaaaatccgtaagctcagtccaaactgaccgagtcttctccgttctgacgctcccgctcgacacctcgaacaagcagttcgggcagaaatatgttgtcacctcttctaccacgcacgtcgggcagcggatagcgtcacagccatcgcagaagtagagtgaaccgagaggatacacattgtaactggaggaaggtctagaagccgagcccagctcggtcgctgcctgtgctgctgatgatgtcgcaactggctgttgatgggaacagtaaaagtccgggtacgagatgcgagctcgtttcattctacgcgcttcccatcagctcgatgtagtgatgatgaggtcctcccgatgcaaggatccagcaagtcgagtctttattttcttattcgggacatgcctcgccgattgagaaaacaagataatgggcggtatggacagagactcttcaacgatcatgaagtgagggccggaggttcatcatttgcttccgaagaactgattgttgactttgtgcagccatcgcgagcccgcgctacacaaagaggaatgacaggaaagtatgctaaggtagtacatctagaccggaccatgctcaaccccgtctttgcgggagcctggaaacctcttgtccgggtttcaaaatacgaggtgcgttcaagatacctatgggctccagcacatactcctcggtccaccagtcctagaacgtcaggcgcatgtagcaagccttcagccttgaacaccctgtaacctgaacctgccaggccgactcacaaattccgtgcgccacatatcagctccgatccagttggtcttacccgggactaggtgtagctctccgaaagcgttgtagcgattcccgtacatgacaacttccacttggtgcaccccttggtctaaatcgtcgagcttgattgcatacggttcatgaatgatcagaccggtgcgcttgccgtcaacgtcgatcgatactgtgggtccagtatatcgcgccacgcgtagagctgtcggttcagcatcgttgatcaccatactgcagtgatagtgcacatttccggtgtagaaggggtatccctgcctagagagatccccccatgtcaagcgccggttatcgaccgacacgatacgagcgttgcgaccatgcacggaaaccccaaaaacgcccagcaaatagatcctttctaagttggtgagcggtccgtattgatgttccagtgtgatactatgctctcctcgggcaaggtaggggagcgggatgacccgtatcgcttcgtcgacccaccaaccatcgggagtgttctggacaagacagtcatccacatagatgcgtacctcgtcaggtctttcgattgcaagcttgacgtcgacaagatcgatgtcgctctcgaaagcgaacttgagcttgagagttccggccgggactctcccctcctttgggatcgtccatggctgcctgaacttggcgcctttgatgaagaatcctagacgggctcgtagcgattgatcgatgcgcagcacctcttctgcaggttgccaaggctcgtcttgccactgatgggagcagtagtcgagaagtaggacattaggctcggaaaaggtgatattgtgcaggaccagctggaagacacgcgatattagcttctataaaaatgcaggctcagtggcgctccacactcacgtcatcaacctgcttgaagtctttccgcaggtttgtctgaaggagtgcttgagcggaagatgaccccggcgtcaatcggaagagcgcactttcacaaccgtcaaagtaatagctgaatgtagtcttgccgtactgctgtgaagcctgtagttcccatatgtttccgtttaatgtatcgagaacctggcagaagtggcaggccaatatgtcagcaatcgatcagccttcacggagggtaaacgcacctctatcttccactcccctttaatgctaccgtctacgggacaagcctgtttgcgatcggtgttggcgataaaaaggtaacggtccacgccgtcccgtctcatctgataaaaaaggctgtctgctcggtaaccttgtgttcggtacagggttgactctcgcacaaccatatcgatgtctcggaaagcatgcagctgtgccaagatctgggccttggaccatgagacccttgctgcgccgggtataagaggaggcgaatctactggcttgacgtcgaccatcgaggggcaactgccggcaaaaatgacctttccaccttgcgccgcgaacttttcaagccgtatcaatgttgtcgagcggattgtccgcaagttcgggaccaccacgacctcgtatgagcacaaccctacgggtagcttttcattgattgtatcgagcggtgtttgatccgcgaacaaggattcagagatgaagtcgaagtcgagatgagacttgagaagccatccggtcagatcggcaaaagcctgatcacgatactccatctcttcgaaattgagatccttcggtccggcgcaaagccaaaatgattcgatgggatgaaccactgcgactcttgtcacagggtagcctctagtcatggccgcgttgacccgggcaaagtgcgtttcgatcgtcttatactccttgtaccagggcgattgatatccgatgcaagccgggtagtctcgtttggcctccccttccatactgctccaagctagatgatgaaccctgagagtgacgcccaaggctgcttgccagtcgccttgacccttatgcccttcaaagttgaatgcccaaccggtcactccatacatttcgcacaacacgccacgacgaccgaattgacgcgagacgctctgagcctgcttcgccgtgttgtactcagtcctgtcgcacagcatgtcgattccagggaattgcatcggtcgatacgctctcatcgcctcacccatctgtgcagtctgtgaagtcaaagtaggctcctgtggagaagctgatgcccatgagttgcccttctgactgagactgaacacttgaaatagactgaccgcattcagatggccagtagctgcaataccattctgctcacaccattgcgaaattgtacccatgtaattgttcgaaaagagttcgcttaggaggttgatgaattgatagcgagtaagattcccttgttgaccgtgggtgtcccagactacctgcggcagattgtcgatgatgttcgttccgtaactgcgatgaaactctgcctccatcttcggagtccaaggtaaaaatacctcttgcttgccgtttgctttgttcaggccgaatattgggcagtactgaggctcatcggtgaacatcgaggggatagtctgaccgaaatggtcgcctagatgcttcttgtagacttcgtgcgtggtctcgatgaaccgtttcgccatgtccgcgctaagaagatctggtagtgtttgatcgcccatgtatcccgaatctgggttgggctcgcagtacgcataccaaatatcgtgttctcccttctcattctcttctaactgtttgaccgatacgagcaggccgtcgcgaagctcgatatcgtacttagctagcaagaaacccttctcgctacgaacgggatatgcgttggcaacctctatctttctgtaatttacatcagattcttcctgatgatcgaactaggtgaggattacgtacaatgcttggtatggcaagtcactaccgtagggccatggggtgaatagaaggtgtagacctcgcagttcaggatgtccttgcaggaccttaccgccggcgaagccgctcggccatctgcagatctcaagtcgatgtcagcgcccgaaatctgtaaggttcagtagaatatctcgcttgcttacctgtcctcatcgtataggaaagcatacatgcccttctccttcgctttgttcacgcacgactttactatccgcatgtattcttcgcccatatatggaatgtccagcccgacgcgcgtatgcatatggaatccgcccatgcccatctcgtcgaacttttcgacctgcgccactgtggccttttcttcctgtttgtgattccaggcccaaaatggggcccctcgatactcgctcggcgggtcaaggaatacattctggttgaagggtttcgtcgaggtagggtaagtgagtggcttcgacattccaggtcgtcaagtcgttgtactgtagtggccgacgaagggctgacaagtgatcggaatggagacctctatagaatcgtgcaggttgcaccttcgacataaggagctcatgtttcgcggtctgcgtcggcgtttgactcgcatcacggaacgtgattgccccgagtccgctcgtagagcgagaccggaacaatgacttcccgagaaagtggttgcaacatggcgggatcttcttggcattccgtgtgtggggactgactggagactagcagtgggcgcaaattcgcgatcgaatattcggtgtcatgtggccatttgatgcatatgatcatataattccccctccttcgagacgcgatcctccgggcgttgggttcgagagccaggaggcgtgtggcgcggagaaaccgaccggctcatccggcccgcgcaccgtttcaggttccgccaagacggcttagcgccctagtgctgtctgtcgacccgacacattcttgaccaataatgcaccaatctgagctcatgctgatggtctagtccagctagtccctcatgtcggcattattgagcagacatctgtcggcgcaactttcccccacgggatttccccgcggagcaccagaggcgaataaagtgcctttagccttcgtatggtcaagtgatggcgctcaacttacgcttgccaagcatgattgggaaggacagtacgcatgaccagtggtgtcgaagtctgtattggaggtctcgtgatatctgcacgcaattgcgactgacgaaggcggcgatactttggcccgaggacaggtacatctttgagccgaacatgcgtcccgctcaactacaagatgtctgacctgtcaagatcagttcagcggggtttgcttgatacgatgactgcttcaacggaccacgtccctgaccacatcgagtcaagatgtcaaacgagaagacacacgacgcgatcgccgttgagcaacagaattatgctgatgacgacatcaaagccgagattttgcacgaggaatttaaggatgccgctgtgaactcagaggatgtagtgcagaagtcgcctttcgaggaattgaccttcttcaagacaatcacgctattcaagaaggcgacctttttggctcttcttgcggctttcagtgcagctgccgatggatatcaggtaagagtctgacgtgatgctggtgaggggctctatcctgactcacaattccaatccggatagattgccatcacgggaaacatcattgccaatactggtttcatacaacagtacggctcggtaatcagtagcaagaccgggaaactgtgagctcccttggtgatgatcgtcattcccgtccatcactgagactgagatcggatttagagcactcgatcctcagcatctctccgtctggggaggtgtccagagcgcggcacaaggttccgcgatgttgtctatgcacttgattgccgacagattcggtcgaaaagttggcttttatgttctctgggtcgttttagctgccggtattgcagcagagtcttttggtcgtacctggaagacctggctggctgcgaagctgttctcaggtttcgcagtcggtagtgtccaggtatgtccgggattgttggacggtccaacctgagattctctcatacctagcttttcctcctggaacatcagtttctgactggaagctatgtagtcgacatctctccgcctcgtactcgcggtttcctcttactgttctactcagtctggtaagctttctgcacggatcttcagtaaccgtatccgaccaactggctccacttcaggtatggtcttggtcagctttgcgcaactagcgctttaaaggccatgagggacaagaaccccatgatatatttgcctctgatatattctgaatgggctatgctggtaagttaagcctatcttctgccaccattgccgtgagctgagaacatcactacgtctcttagggagttatggctatcatttacgcagtcatcccggaatcgccctactggtgtgccgctcgcggacatcacgatcgcggccgggcgattgtcaagcgcctcaacggaaatataactgactacgaagtcgatttccattatggacttcttcggcaaactgttgaactcgaacagaagcgaagcaaggaacttacaggaggagaagagactttttggcgaaccatcaagaataccaaggagatctttatcggtgtcaatgggcgtcgaaccttgatagcgttcatgcccgccgcggtccagcaattgacaggtctagctgtgctatcgagttactcgagctattttgcgcaagtgagtaaacactgacgcaacatccgatatatctcgatgtaccaatggacctgacgtattgaaccatgtctcccagatggccaactttgccgacccattcttattcacggtcctgctggctatcgtgtcgatcggtatcaccctggtgggggcggtcgtcatcgactactttggtcgacgaacgcttttcatgtggtccgcttgcatcacctggattaccttgattcttatcggcacgctaggcgttgcagtgaagaatatgcctggttccgtcgagcgattcgtcgtgagtgcggcctctggctggtccgacggacttgtcgaccagcgatctgtctgtccaggtctttttgtccatggtgtggcgcatggcatctactattctgggagatctcgggtggtcatatgttgccgaagcaggttccagtcgacttcgcactaagaccgccggattcgctgcgtgcggcggggtactcttcgggctgctgttcaacagtaccgtcccgtacatgatcagccaggatgctgccaattggtaagctgattgctcatctgtttgtcacgtcatttcgcgatccgcccgctgatctcgagtttcaacttgtaggggtctgaagacggcctttttcttcgcgggagtctccgcgccattggtcatcgggtcgttcttcatcatgcccgatacgtctcgaagggtaagaatctggacttccgaaatcggaaaatgttcccctcaccgttcaatgactactttccagactgctgccgaattggatgaaatgttcgagaagaaagtaaaggcatggaggttcagggattacgttacagatgcgcagaaggctatgtacgcggagcaagagaggaatggcgagagacccgttaccgaagttcgagggagtgcttgaaggtcgcatcattgtcagtgactcaggtattcggtttggaagggttctttttgtacatacggattcttccctttgaataattgtatgatgtacgaacgattgacatcgagtgatatcggttgtgcgtttggtattattggcttgctcggttcgcagatcccacgctgagcgctatttccgggatcaaccggaagttaaaaatctgcctccgtataatcgaaaaggggctaaaccggcagaggcgagagcgagagatctcagcaaatacgagagaacagtaacttagaacagaccatcaaggtattcccggccattcgacgatgttagaccctcctttctgattttgcaaagcgaaactcaccaagccatgcagctgctgtcactacacgtcgtcatagtctgaattcaaacgttcatacttgtgcggacggcttcgaccgatcgtagtcaaacctgcgggacgaggaagccgtgtcaagggcaacgtgcgtaaggcgtcaagtcgcaatatcatcgtcgatccgagtgaccccaattgtcctccgacatcctcgcaattccacaggacaagatcgcaatcttaagtcaattgcattcacctccatcagccagccagtgtagtacgatcgttacttcgactatcgatactgcggagtcacggcacagcaacccccgatataagatagcatgatccggatcgccggctctaagactttgctactttgctgacctggcgtcgcgtctaccaagcctctaatcaacgataccagtctcgcgatcataccagcctgctcccggatcagctctataagactcattgcaaaactgctaggcagcatatcccgcctgtggcagccacacacacacacacacacacccgtacctactcgacacgaaggctgctctgaataccatgaaccagacagcggaaccagagagcgtggagcctgatctgatgtcgcctcgttggagaaggtcggaagaccagcacacgttatccctttcggatgtggaccggatcaccggtcgaacggaaggggacgatcgagagatgataaagctgtctcggagccaaagatggctgcaagctatcacaggctctctcaacttctatcgaatccacctgttgaccttcacgttcgtaagtcaggaccgctttgcaggtcatggcacgtgtttcgctgaattgagtcgacaccttgatccaaaagctacctcttatttcggcggccatatttcatgcttgcaacacgcaattcgagatcgattatatcgacgccctcttcgtctgcgtttccagtatgacagtcaccggcctttctaccctcaatttgagtactttgagtggatttcagcaagccattgttttcatgaacatgttcatcgggagccctatcttcgttagcttgatcatgatcaccgtccgcaagtacttttttcggaaggaattcgaccatatgatcgaagccagaaggaaggccctgagagaatcggaagccggaggattgcggtctccattacgaaaattgaggaccatgtcgcaaaactttaccgcgcaaaatcgcccaaatctcggtcaatcctcttggatcgatcggttcaaacgaaaggccggccgagacagcaagagacgaagtgattctccgacaaaggagggggagattgctccttctgaggattcttcccacttcgagacggcccgcgaaacttggaagaaagatatttcgcaggaaggtgtctttacggccaatcccacttatgctactagcgaaagagttcccgaaaccggaacaccatcggagaagccgcagaggccgagacctaccatggaacgtcagccgacaaattgggcgtggcactggggcaaacatgaaggcaaaccacttcctaagcccaggattaatgccgacatgatcaagcgtgttgaaggaggtgggctagggctgatcaatcctatgggttggtatcagtcatcgtcggcaccaggatccaccactgcgttcggctcttttgctccgaccccaaacgagtctggaccagggatcctcgataacccgttgaccaccgcgcctgtcgacgagaccgatgtggccccgctcacagagagtccccgaagcatgaacgcccgtctgccagacgtcgagaggacacggacgcggtcacccgatccagacctcctgcgtcgaggttccgaaccacctctgcatgcgcattccgccccggcgatcgaggacaagttccctcggacgaaaacgattgcgtttgacggggtcgatgacccaccgcgtactgcctatgctagtggcagagataccgccgggatgtatgcacacacccctggtcatggttacctacctaggaccggcactatcagaagtgcagcgaatcccggaatcatcggagcgggcggtgctttcggatcaggtctggacagaaccatgaccggacggaggtccgtcgcgggttcccgcaatatgccgctggcaccaacgatgaacaccggatatatgccccgcaccaagacgatcaaccaagttgccaagcatcaaaacttcggtggtttcccgacaccgcttgccctgggaaaggcattattcgtcaaagtattcccggatacgggcgagagattgaaacgcaatcttacaatgcaccggaccgtaacccaagccggaaccatgacacagacaaatgatggtatcagtgaagtcaggcctgtcgattacatttcattcgatgccagtgagttcgaccgcatcgctatgaagccgtcttgaagatactgagcctgcgcgggtagttgttggaagaaacagtcatttccacgatttgacgaaagaagagcacgacgaactgggcggggtcgaatatcgttctctccggatcctcttttggatcgtcctggctgtgagttgactgcattcaatactgtcttgatatcactaacgtagaaacaccatggtcagtactacattctccttccgctcatcggattcatcatcgttggaccgtacatacgcgctgggtgggacgactctcttcaaagtgatactcagtatcgatatgtcccgcctttctggtttagcgcgttccaaatgtggtccgccttcagcaataccggcatgtccctgaatgacctgtccatggtaccgtaccaaaaggcgtatccgatggttttcgtcatggtattcttgatcttcgccggtaacactgcctttcccattttgtgagttcaacccagcgagtcttcctccaaaaccacactgatgaacgattcacggaatttagcttgcgcttttccatgtcagtagccagaatagcaccttcgaagcatccccgatctgatccaaatctgggttatctaacactatcatagatgggtattctccaaggtggttcccaagacttctcgtacacacgagacgctcaagttcctgctcgaccatcctagaaggtagggttattgaaagcggatcctgagctcggtactgacgcagtgcctcacaggtgtttcgtttaccttttcccatcgactcagacttggttcctcttcctggtcatgattacattgacgtatgtctccagtataagcctggttcagttcttgctcactcaaccagacgggctttgcagttcgaccgatttcgtttctttcatggtgctggatatcggtaccccgtgagtcctgcagaatggaatttggaacgaaacgtttgggccttacccaagcggacttacagagatatcgaggacctccctgttggtattcgtgtcgtagccggtatattccagtcgacagctgtccgtgcagccggatttgggatcgtgcctttgaacagtctagcgcccgctgtcaaggttctgtacgtggtaatgcgtaagtctaatgcctgaatgttgctccctgatgaataaaacgctgatgtcttttgccgatccccgaccgatcgtagagtacatctcagtgtaagaaatccgccgccgactaccttcaccgctatgtctaattggtcattgcttcattatagataccctgtcgctatgagtatccgtgctaccaacgtctacgaagagcgatctctaggcttgtggaacgaggacgaagacggcgaagaaccctcatatcaaggacagcaagccgttgcgaaatatttgggttggcagtaagtcgcccacgctagcgagattggtatgtgcagccctaaacacatcctcctgggtcctagtgctcgtcgtcaattggccttcgatatctggtggttagcgttcgctttgtggctgatatgcattatcgaggtgagatgaaaaggtcgagtagcaagccaccagaatccactgatattcggtgatatacctgcagcgcggcaacttgaacaacccagacaatgcgacttggttcaatatcttcaatgttatttttgaaatcgtgtcagcgtacggaacggttggactgagtctgggtgtcggtttcgacaatttctcgtaagcatatgccgaaggccgactggaagcaaatgactgacgttcaaaacatcgggcagccttgtcgggtctttctcggtgctgtccaagctggtcatcatcgcagtcatgattcgagggaggcaccgcgggttaccagtcgctgtgagtctttgtgtcgttatcgtatgtttccaatgatcgagctcatcgtccatcctgcgatcatgtccacattagattgaccgggctattatgctaccgaaggacttcaccaaaaccgagaatatatacgaggatgagactgaccgattagagaggcgccccactcgtcgaggaaggtgagaatctcaaccggcattgcggacgttacagtctaaggtacttacgctattaccgatgcctgtttctagtatggcatcgaatcctgcaacgggagtctcggtgacgtccggtatacgacgtgaatccaacctctccggagagccctctttcagccatcacaggtccgcaagcgcgggcgagaacacagcgttaccagagccgcattctccaaaagtggcccgccgcacttccgtgcgatccaatggcagtcaacctgaaactcgaccagatcggtcgccggagagagcccgagccttttcagtgggccgcctcacttttgaaactggtggactaccaaggagtttgagcacggtgcaggaatctggtctcagccgagcgcctacacgaagagacactgctgagctggagaaacacgccaatttgcagacttaatgatagggacaggagcatggcttgcgagaggctttagctgtagacaccgttgtatagggtattccttaggacagatatataccccccctttgacaacgatcgtactttgacgcgtagccagaagcgcgtctgtttgcggaatcgtcatattcggtgcgaccgccagaatctatcagagatctcaaagcgtagaatcataccattgatttgtacgacttgacagcagtcttcgtgctggcctaagtcatccatcttgaataagaatagtaaggtcggtaaacagattacaatgtcgtcatccgtactaggtaaaagatccaggagctctgcatcgccccccaccggtcaagaatcgggccatcctgaaggaatcgactcggtgcaagctatcgctccgagcacgtcgagcgcggtccccgttgagatcgatggacaggccgggactaacctggggactgttgttgaagatgaagatgacgatgacgaagtcggtccgactctcgatatcggaggggatggtcaagagaacggttcgaacaaacgtcggaagaagaaagccggtgagacccaactcgcactgcttgaacgagctctcatgtcctgatctacccttgtcgaacgatcgcagtgctgccgcacgagaaagtttacctggaacacttaccatcagccgagagatactacaaatcgtttatgcatcgggaccagattaactttgtaacgatgaccaagtgagagcacaagtccggcaggacttatatgggagcctgtacttatctgaccttctttatccttctgccaggaccgactttgttatcactacctcggttgatggacacgtcaaactctggaagaagcaggcagacagcgtcgagttcgtcaagcactatagggcttctctaaacccgatcgtggctgtttcggccgatcacgagggcaaggtctttgcaacggtttccgagggtggagaggggcgcgtgttcgacgtagtcaactttggtaagtaatccacgcatcaaactgtctataccgttggcttttcactaacgctcttcatacagacatgatcaacatcctgaaattcgactacacgccgaaggcatgctgttgggtccatcatccgtcggatggtcgcttcctccttgcaatgtaagcggcactcgatgtcagtcacctctgttcgaggtcaggctgacgactgacactcgtgtacagctctgatgccgattcacccaagatctacgtctacgatgctcgcggagacggaacgccgctccacgtcatcgagaaagtccacagagacagtgtgcacgtcatggtggtaagctaggctacgaaagttccgatgacagcgacactgctaaagactttacgactcacagtattctccccgctacgactgcgttgtctcggccgacgaaggcggattcgtggaatactggcggccgcaagagccatggggccttcctgatgatgttcccggtctgtggcagtataagagtcagaccgacttgtttgacttcaaaaaggtaggtggattgactggctataggcgagcgatgcaagctctgtatactaagcctactcattctacatagagcaaatccgttccccattctatcgcattgtccccgaactcgtcgcactttgtgacattgtcactgccggaccgacaagtccgggtgttcaactttttgacgggcaagaagactcgccaatacgacgagtcattgaccgccattcaggaaatgcagcaggctggcactgcctctgcgaaacttgacgatatggaattcggacgaagattggctgtagagcgggagctagagcggggcagcttggaaggcgagggcagcactggcaaaggtggacttctcaggacggcaaacgctgtctgggacgagagcggcaacttcatcatttacccgactctactaggaatcaaaggcaagcctggtcgtgaaagctcgatctacgaccacttccgtctgatcagtccacttgcacagttctgaacacggtcacgaatagggtgtcaagaatgctgggaacttccgaaacttcgagatggctcaatttggcgcttttccaaggtgccccttccaagaagggtctgaagacactggtgagtctcctggagacattttcttttatggaaaagaaggctcttagcttggccgttttgatcaggctatggctgcgtcggcgaaccccttattgttagacaaggaaggtcgagaccccacgctcttcgctaccgccttcaaaaagcagcgattctatatcttttcgcgatcggagcccgagtgagcaggatacaaagttgattacccaacttgtatagctgacctttccgttacagggacacgaagggcggcgatcgagatatcttcaacgagaaaccgaccagggaagagcagaccgtggctatggatacgcaaccggtcaaaatcgcggctagtgggcggacggccgtcatacacactacgaaaggagacatcgtgggtatcgatgcatctcctctaagagaatcgacggaagattgactttggtgaacacatagcatttccgactgcacccggagtacgcgcctaaggcggtcgagaactttgtggagcactcgaagaacgggtactacaatggcatcatcttccatcgaattatcaagaaatttgcgagtcatctcgggggactgccgtaatcagcggccttgctgatcgcaagtgtgcgatttatcagatgctacaaactggagaccctcttggtgacggtaccggcggttcttctatctggggatcggagttcgatgatgaatttactccagccttgaggcatgaccggtcagcagagcaagatgccctacatccaggggaaaagtgaactgaatgagacctctgcagaccttacactctcagcatggcaaacgcggggccaggcaccaacggaagccagtttttcattacgaccgtacctactccttggctggacgacaaacacacgtgagttttcgatcattcaagtcggcagtctctcccattgaactccctccctatctacagcatcttcgggcgcgcaacagcaggactggatgtcatccacgccatcgaagacgtacgatgcgacaagactgacaagccttttgaggacatcaagatggtttccatcgatatcgactgatcaaccaaatgatgtatatatatatatatatgccgtgtatgcgaaacaatcaggggtatgagtggcactacaagtacaagaatagcacggcctgacttcgagacacccttccagaatcagaacttgatgcattgtgtctccaccgcgatgttgagtatggtgatgaaacaataagaggaaagcaggaatattgcccagcttttggtgatccagtatccattgtatggaacgaagcacatagtggcgacgaggagtgtgatgagcccgatagcagaaacccagagcgtcgacgaaaagttgacgatatacgaatgaccggtagcgaggatgacgtatgtacccgctccaccaatacctagcaggatgttgagcatcggtccgccgaaactaacgagagatgatcagctggcggcaatgttgactactggccggtgaatcgctcaccatgctgcatatgacattgaaggggcaaacgaagctaccgtaagattggcgatcaagtctgcacaagagttgccgatggcgaagactatacggtatgcatggctcagtctgggtgtcactcattgacgaagaggactgtccagcttactggtaaggccgatgattgcgttactgagacccaagatgtgaccaaagacctacgaattgggcaaattaggactgtgttaaccttactggattcatgtggacactcaccctgaggatgtccactacggcatcagcgattgcagcgatccaagtcatagccgcgagaaatccggcgaaacatcggatcaaccgccaatactggttttgtccgtcgtctgctcgcaacagcacgacgatggcgagtgcgacaccaccgcttgtcgtgatagctatggcccaggtagaccaatcgtagtcggctatacggctagttgtgagcatgtcttgtcgcgatacctgcaaagaacgatagcgacttacagaaaaacacgctcgagcagaataggggaccgaaaacgcattgtgcagcggtgagatacttgttgaacaagagagcatgcccgacactgtgttgctcgctctcgacactcctctcctccaagtcagatcccacgcccggcgtttcgcctacgcccgggcttccggcgttctgactgaagtagtctgactgatgatgatcatgacggctatgaggtgaagcgggggaaggcatacctgcatcgaggataagatgatgcaagcctgcccccgcgtgcgcggcgaaatgtttcgatgggtcatcgtgctgagctgacgatgactgcgccgtttctaaatcaacatcgcttggtatgtcgtctgtcaggacaattccgcccttgttaaggctgcaaccctcggcctcgtcatcgactacaggcagcgtcagggttaaagcgaaaattgcaggagaagcgaatacccccaggattttcccagtaagcgacttgtgttggaagccttgcaaagcagggaacaggacatgcactgtctcgtgcaagatatgttgcactttgtcacgcttgcgcttgcgtggcggaatctcgtgctgatcaccaagaagtggttggcggggcaattccgcctccacgagtgttgactccagactatcatcggcaggaataaggttaatcgatggtacgggacggtgaccccttcgaggcgcaggtgacggcgatgggccagtatggttgaccgtgtggtttgtctgctcggagaaccctttaatctcccttgccaacggtgacggcttggattgagctttgggcgatgcctccggaatcgacaaggacaaaggcgcatggatatccgagatcgacttagatcgggatcccctgagtaggggtgtagctgaagtcgacaacagcggtatgacctcggatacccctggtaccgtttcttcgacatttccggattcagcctcgctcagttgagatcgagggatcccagtgaccgatttgttgcgacgaccgagccttcgatgtgaaggactgggagcccttggatggccatggtgggcatgtgagtgatagtgtccgctagagtaaggggttattgggccaaagtaatcagacagatcggcctcgtgatgcgggtcgccagagtgaggtcccgacagtgaatcgatatccgatcgacctgatgccattccctcctttcgtagagtgttgatcgtgtctctgaactcgatcgcgccgagtagcgagaatgtcggtcgtggaatgtcggagatgggtcgttcttgcgagctaaggttcggagatgctcggaacgccgtgtggagattgcgttgggttgtcgcattaaatgacgatggagtaggaggcgcttcagaacgatctgagcctttcgacgatacgctggacgaccgcgaccgctgcgaataagcgcgagccacatccggacttggcaaaggcgtcaaaagtgaggtggactctcgaggtagcagactgtccgaaggagctagactgtcgcgatgagcggacaattgctgggtctcgccttccgggtctgtcggtagcgccagacgtcctgtcccgtttctgccttcgttcgccaacccatgatctgtctccaagagattctgcttgcggcgaccccttcggtccatccaccaattgccaccgacaatcagggaaacgtagatgacatagagcagcatcaacccgccggattcgatcaaggtcaatttgccatctgtcaggcaaccgaccaagatcagaacggatagggtaaagaatccgacgtcccggatgaacggccaccgaggaacctggaaaggttggacgagcgccatgcatccaaccacgacggagatgatgaaacacgaagctccgagtaactctccgatggcgagtgaaaaagtattagaccggagcgccgaaaacgttgaaaacacgtcaggcgagccgtttctgtacagtgagtattcaagagcgctcgtcagccttgttcgtacggggcctgtgttgttctcagaaaaagacttgcccaaaggcgagaaaagtcaccccagctgtactttcggccatacccaatcgatcagccacggtggctagattgggacagaaaaaatcggaagcagtgattccaatcgtcgcgaacaagaaagcacccctagaaccgggagagtggcgatttcaacgtgagtttgcatcaacacgaacattagtagtgatctaccacgtaccacagcacaaatccggcgaagatgaaaggtttgacgtgtggttttgcgccgttgtatagatcccagtaatcgatcccgaatatccccccttcgggctcttccacatcgctgacgggcttcgcgtgacctgccaaaatatcttcgattgcgcccatcgtcttgtgatccgtatgtgatcggtcatcagacaggctccacgctgagacctcagatctccgtgcaatctttgaagtctgaagctgtacccgctgttgcaatttctctttgcctctccacaagaagcattgcaaaaccaggctcaaggcgagcaggataaagaccctagagattggctttcgaaccttgcccggggatggagccatcatgagagctagttctgaagaaacgtcaagattgacagtcgcaggagatggttcggtatcagaatagctatctcgatcacctcaacttgaccggtcgaagagatcagttcagcacagcagtacgtagtggggaccttcctttttgatgatgatgatgatgggtagcgacagattctgaccccggtccgacgtcatgcatgatcggtctaaaccgggaatcaaagtaattgacgtgttgaaaatgaatattctttatcgatcctcattcatcccacgccgccgatctccacagccaccgagaatgtcgcaacaccacacaggcaggcgggggagcggcattggtcgcagcgagacacagataccagagttcaagtcttgactaataatcatgctaattatctggatgggcccgtacaagctggtgatatctataacccttttacaagtctgctttctagtgagtgtcggggtgctcgccgttggcgatggccacccagtaagatccgctagggtaggtgaatttctcgatcgacttctggtacctgttcgaggtcaacgaaagcttgtcagtcatacggttttggatgacggatggctgtcttgcgcagaaatctatgacttacatctcgatactgtagccgaccttctcaccctgaggcacattgtacctcccttcgctgttgatagagacagggtagaggaagttctcgtgcagatggctaacaatgcgtccaaaagtcagtcgctgccttcgatcagagtgcgatcaccatgactcactcgacaaactcgagaacgtttcggtccatgttaccggacacgcagatgtagtcgatgagggagaggtggatctatcgaaggggggccgtataagctttatgatcgataccgatctcagacgcccgttccggaacgtacgacgtattcacagagcccgacaccgccggcgtgagggcaaacggggatgccaaacttggccgacatcagcaagacggccaagacctcgctcactcctcccaatcgacaagaatcgatctggcagacatcgatagcctcggcttgcaacaattgcttgaaggtcattcggttgtgagcgtgttctcccgtagcgacaccgatcccgtggggtttcagctgcttcctgatggaagcgtggccgagagcatcatcaggtgcggtaggctcctcgataaacctgatcaaaacggtcgagacggatgagtcgcgacctttggcgaaacggagaagtcacgacactcaccaaggcttaagaggcttcaacttctgcatgtactccacggcttgtgagacgtcccaaacttggttggcatcgaccatgaggacacaaccggtaggtccagcgttcttgccctcgatagtcttggggtcgacattcttcctgtcctcgcggatgttcttggggtcgtcgatgatcgatcggatcaacataccccgacggagatcatcttcccaatcagcaccgactttgagctgtgtgaaggaaaattgttcatgagttcaagatggctcgtcgaccatcgaacgccacacgtccgctcaccttgaagtggttgaacccctgttgcagggactccttggtcaacctggcaatcttctcatccgagtaacccaaccacccgaccgaggtggtataagcgggatatccacgcttgatgacctcctcttcacgggccttcttgctgctctccttttccttcagcatggcgagggcctcttcgggagtgatggcatcggtgatataacggaagcagaccgacttgacgaattcctccggggaaaagtcgcagatgagcttccagagaggcttgccccgggccttggcataaaggtcccagatggcgttggcaacagcagcggtagcaaggtggataacacccttttccgaacccgtccatcggagctgagggtcgctgacaactagatagacccgacgtctatagcgttaggaaatacgtttctgcgtcaaagagaccttgaagcagactcacggtagtcgtaagtcttgcccatgtcggcgaagaagtcttcaatcttcttgccgacgaccatgttggcgacgtggttgatagcgtagcagacaatgtcgttaccgcgaccgatggctacgggacgcatcgatgatgagctctagcccacaggacagccggtctcaaagttaacgcactgaaggtcattccttgacccttgagatcagaggaagtgttaagtacgacataggcggcagagtaatcgcactccttgttcctatgggcgggaataccaatatcagcattgtgattttgtgctgaaacatcgctgtggcttacatggcatcggtaccgtcaccagtgacgttctgagttggagctgaggcatcagggtcactgtcaaacctctagtcggaacgatctctactcacagtagggtaacggacatctacacaaacaatagctcaacatgagccagtgaacgacgggaactgcctgcgcacattatacttaccgtgaaccgtgaaagaggtaatagtaacgtcagacattgtaaagtattgaagtgatgttttgcgatctcgatgtgtttctgattcagacaggagaattctacagagtgtgaattagcaggacatgtggtcgtatcttatatgagaatcgagccagacgatgtcaggtatacaacgaccgaccgtcgatagcctgctgcttctcgagcactccctggccgaatacggtccgagccacgccggcccgcggcagtcgaccccggcccggcgcgtttcggacgacaggcgctttcgcttgttgcgcagccaaatttaggacaaagtccccgaggtcaatgaatattattattgtcttgacatttgatcatgagatcatgcgacatgccatccgcagctttaggtcaaccggactggagagacggtttcagaaagggaatagagaaccacgggttgaggacaacaaacccataaaccaacttcgacttaatggtaatcaggatgttggaatcagttcgtattctagccatacaatagcagcgggcctctatcgagtacaacgcggcaacatcgtcatcctatggtcgtgtattgtcgtcagtttcgtagccttctgtggcagtgtgatagctattgcctgtcatggcagaaaagtcggtatccaagcgctttatggggggaattggtggaagatcgattttggaaagagcttcagcctgatgatcgggagccaataactccttcgtatcctgctctggatagacgctggaaagcgtagatggataggacgtgctccgcgctggcggggccgggaagtcgcgtacgatgctggcgatttcatcgggctgacggaaaaaattcgtcggcgtttcgggactggaagtcacgggatagttgggcggcagcggtcctgagcgaccagattcaaggctggaattggattcgaattgagggagaacaaaaccagagacgccctgtccagcgctgggtgttggtggctggcttggatggtgggtagatggtgatcccccgactaccacttctggtaccacactcgcacgaggaatgtgtccgcgttcaaagttgctcgtgagttgatccatcgaaggcgaccggtgggcaggtgtagccgaaggcacggtaccgacatgcagcgaagctaacggtccagcacagcgttcaagtgcgagtcagcgggattctgttgactgcacttgcttcaagtcagactgaccgctatcggaactactcttgtggaccaaattctggcgctctcggaagacaaagtcaccgtcactaccgtcatcggtctgggtctgatagggcgagccctgaaacaagctgttctcctcccgagtccagggagggtattcggtgccaaaagctttccgcaatgtcgcatgactcgcctgacggtcaaggacgtttggtgaagcggcatcgactcgcatttcgaaaggcatgtccaggccatcgccttggtttggggaccagccgtgatctccgtaggcgagaaccggtgtggcgacctcgatattgccgttctcagcgctggtgtcctgcgaagctcggatattctcccctgtagttggtgtactaagcatttgcgatattgtggagccttttgatgtgcggtgaagggatccagaggcagcttgcccgtcaagacggcgacctgccaggtcggattgcaaatacgtagtcgaccgcaagggcgaatccggtacaggatatgccaaaggtgaagaccaggtcatccgcggtttggcaaaaaataggtccttcaatcaagaagcgatcagtctttggctcgctttggacccgatgcgtaaacatacctgctcgtactgatccaattcatctattggcctccgcggccaaggggaagtgtctgacatggcaggcgagatctcagccgagtccccggcgcggatcggaggtaagaccagtaaagggctggaatcgctaccgcggggtgcgccgtcaggtcccggatgcttcccagccgaggaggtggaccgagtagattcattggcttcagtgactggcgtgagatactgacgtgcatttacttgagggagtataccagcggcttccaagatctcaagccgatctcgagatgtcatgggttgactcgcaccggcatcggcaagatgcatgtgctcatacttggcgaatgactcgggatcttccccatataacaataccgcggatgatctggctcgattgacagcttcctcgatggaagacttcatccttcgcggagagttggacaagcgggaggctaaagctcgagcggtgtgcacaggaagtggctccgccgatgggctgttcacagtactccggtcagggctttttgcccgccttgtcaaaggaacccttgcgggcgaatcggatttttctggaccgtatgattgtgcttcggacagcttgaagtaccgtgcgcgcgcctctttatcccccgtaaggcgttgcgattgaacctctggaggcacatcggcaggttctcggccatggtgactagaacgtgcatttcgagctccgaaccatggtggcgtagtgggtcttgccgtccttggatgcgtgcgacgaaggaggtcgccatccgcaaattcgctggtggccggttgatgattcggaatcgaccagtcgggactgggatcgctggcttggcgaagatcaggcgagctgtgaatgcgcgaaagccggccttgatgttgagaaggagtacgtggtataggagcggcgaaggagtcttccgaagcgcgactgttgcttccgtattggtggggctcattacggaacgattgaacacctgtcgaagttgacccaaattgccgtggagagttgctgcccgctttgcgtgatgaaccggtcgctgaccgcgagcgagaccggagactcccgttcccatgcaaaaagccgaagcttgtactgataggcggcgaggcgttttgtaagacaggtcccggaccactgccaggcggaccgggcagagcgaagtaggtgttcccaagattttgcacgctgccatcgtcccgtggacctctgtcacccgttccaaggctattactccttggtcgccgagtgctacgtttgcgcccgctgctgatcgatcgagcccaagcttgacgctcgcgttcccgttctgcgccctcatccattacccgaaacccgctaagcgctggactggacgttcgctgctggtcaaacgtcaccccgaatttcggtcgatcgatgacaagtatatccccagaaggcggtcgagctgtctctttgcctttgtatgccgggaaaaaggctcgctcacgttggacttgctcaggcgtggctgggggcgaggcttcatgagcgaccagctttggccgaggtaatacgagttgctcacatccattccgggcttcccatcgcgtcggctggagcatctgcacggcctcctgactggcggaacgcgagagtccggtgcgcatccaattcacaggctggtcggagccacctctcgagacctgcgcatcgctgattgcaacgaccggtcgaagtcctgagcgaggctcagactggacgggagtgtaccgaggcgcatttggatgcgagtccgcgttggacgggaactgttgcgcacctgcacgggacccattctccccgtatcttttgttggggccggtcattgttcgacgtgtttccaggtcctccacttgcttttgcatatggctaggtcccgccggaagcagcactgcgttactagggtctagtgatttcaggtcaggtttttgaagcgatcgggatactcgtgctgccgtcgaatgtgtcggtacaggtcggtaagcggcaatagatagcccaaaaggggcagatattgctggggaggcgctcattgatgcggacttcatgtgcgctttctgagaatgacggaacactgagatgtgcgctccggtgtgatgcgatacatcccggtggcctgtaaaaagtcgagtcgcaaatagagatctagatggagcgggctcggttttggatcgattgtgctgagaaccagtccggcgacttccgtcggtcaggtcgagaaacgttgaatgaggaagcggcctgactagatcctggatgttcaccgtgttcgcgtgcccaggaccgttgctggcgggaaacgtgaagccgaaatccatatcgtcggtcttcgtctcacgccccgccgagaccgacggcaggaaggatgtacctgcagccgctttgctttggcgaccggccgacatggaggaagtgcctgacccggcactgctccagaatccatggagaccggttccgatgcggttcatggaccctggcgaagcaggaaaagcagagcccgtcgaagatgatcctgtcttcttcttctgcttgggcagtggatctttcggtgactcccctatcccccctccaggaagactgtaattgctcgaagcagcgccggtcttgttgccatttaggataaaggttcgcggcgaggacggagaggcagacccatcgccgtcctggactgtcttgctatgcttaaactcctgatccatccaagaatatcgttctgatgatgacagagacctcgtcgtataggtggaatttggcgatactacagatttgtacggctgtgctgactcctgctctccagtgtggacctgctgatttccatggttctgggtagcgagacgtagaagatcgtttgacgatccgctcagcgacttgtgatgaccgtatttagggcgagaggttgattgaaacggactcctgtgcgttaataaatgatccagtttgtcagctccgacttgaaaggaacttgcgaagatgatgaaagtagctagccagatcgtctcagcaagtcggacggggtatcgtctcggctgtccccgacagctggcaaacgatgaggcggtagaatcccggtcggtttttctggattttccgctctctgaataccgtccgtcggaacacccttccacatcgagccgagcctgaggacagtccgtgccgtacaacaaggcactagaaactcacgtttgtacttctcgactcgaaatcatcctccaacacctccggtaactcccgagatattgcgtgcggattggtccacaaggaggataagaattatgagaagaacatgatgcgatcacacaggaagaaacccctttgttcgttgcgagaaagcctaatttcgattaagcttgaccgccgagtccagcttgctcgctccacaggatccgtgacgacgtgattgtcctatgcgtctggcggcgggatcggacgacaaggtctgtcgggcgatagtgtctattccagtgcggtatcaacgtaaacaggtctatctagtcggtcctgatggaggggataacgaccaggagtctctatacgattcagactagatgcatgccttcgagtactttggcaactaacccgcgtcacgcgtcccccggggaaaaggttggaagacatgttcgatcccgtttccaaacagagtccgcgatcgtaccacggcctgacaccgagacttctctgcgttcaaactgcaagtacgattgataattgacagtcctccccgatcatgttcgaatatgcgacaatacaatgctaagatcacggactgagggtctcaagacagcgcgacggccgtcatcattcttcgtctttgtgtgcggaaacatccttcaatctgccgtcgatcaagggagaaacaatggcgatgtcgtcatccatagttctaacttcttctctgttatgctctccaaccaagaacgtggctttcatcggtggcgagacaggtgaagcaggtccgttgttcgactgagagctggggggaacggccgttccgcaattggtgcaagtcaagtctcgtagcgatttaccatcctgtgacgatatactcatgtcaaaaaatgtttccgggacggcagatcgaagttttactggagacataccagcgcatccatctcggacatatgctccctccttgccagatgcaatgcatccctgatatccctggcatcgtgatctacgatgtgacgtctgtttgtgcctccattcgagatgcaaccgctgctccaggtcttggacatttgagatactaccggggatccctgaggcgagttgtcaaattcctggtgaggcttttcgaaacgggctctatgtctgctgaggacctcgtcactatgcgcagacatgtgtttgtgatgctcatccctcagctgcttgtgtcggaagatgtaagccgagcctgatcatacgaggtcccgcgtcagtcatttctcgtcaagcacgaaagggtagtaatattactcttaccgagcaaaaacgatcgcacgatcgacgacatgatctgaccgttatcatcatcgatgataaacttgcggttcttgagatcctggaaaccatcgtatccctcggccatgtagttcctggtgatgattttgtattgtcgtccaccttctaccttcttgatttcctcgcctttcttgggcttgctctgcttgacttcgatcctggtgccgtcatcggtttgtatgaaattcacggcttcttccggatcatcgattttgccgtcgccatcctcgtcctcgagtggcaagctcggttcggtcaggtggacgctgaggatcctctggtttggtggttttgtgtggtcccacgtcacgcgaagtcccgctacaacggggaaacgtctgagtgtgaaagagagtcagatatgagcgtgtgtcaagcagtttgtctgcccgtctctatcttacccttcttgagctggccatttactgaaggcgcattccagaacatcatgcacgcctttaccatcgagctgcaagcgattgtcagcacgagatcgcggacacgaacctatgatctgcagcttacttctaggcagacgacagggtcatcgaatggcaaaatctccaggatatctcccaacgtgattttgcctgaacagagcgaaacttcggatcagcaactcgtataacgagacttgttcacaagactgacccgcagggtacaggctgtctccccggaaggtccctccgcagatgatgaccgcatccgcctcgtttccttccccagacgaagtctcgccctcttctttgccggcctcttgcaagcgctcggcatatgcatgcataaggatgtccgctacccaattaccgatggctgtctcttcggtacggaccttctcgctgcgaacatcgaacggcgtcaagctaaagcagacgggctttgacaatgtgtccgaaacggtggatagcaaagaatcgacgagcttgtcaacctccggtgcagtgggagtggccggtgtgatttcgtggtgcttcccagacaagcttttgacgaccttgttcctgatgcttccagccggagtatcctcgagctcgaagacagcttccgaaaggtcacggaaatcggtcccgctcttgatgagacatacccccttgtcttccgatactccccggatctttgggtcacctcggaaaccttcccattcttgtgctccttttcctatgtaatacatgctgcactcggaaggttcaaaaaggatgcccagtgatggatctgctcgcatcagactcactggtcatgccctccaatcaggcagtccaccccatgctcgttcttgttgtcttggcctacggtcgcagcgagctcattggcaagtctgatgtcctgatcaatgcgggaacaacatttcgggatcagctaagtagcaaataccttttttgtgagtttgactcacatttggcaagcgacaatgtgtgagggcgatgatcatgtcaaccttgtgaggcccggctgggtctcgcatcctaatccggggaacatttcagcgatgatccgttgcgctgcaatacagtaccacgtactctttggataattccagtgcgacatccctcatctctctatacttgaaagtctcaggccaagatgctggaagaagcatatcagtgaatgcgttgcgcaacatcatcctcgcgatagcttacggattgtagcaatccagtcttgttctaccaaaccgatgattccgatacgaataccacaccgctctttcactacgaagcgatgcacaccttcaggattcttgccggtcttttcgtcaatgatgttggagagcagccaggggaatgcacaagatttcatcagggtcgtaaggtgagcatagctgtaaaggtcaaacagtcaaatgaggaccccaaacaagctcaaaggaagtagcctctgaaggctagcagctcacccgaaatcaaagtcgtggttgcctagagaagaggaagcattagactaacttcttttggaggcaagacaagcccacttaccaacacatgaagcgtccagcttgagttctctaaggatgggcaccatatgtgaacctcttgtgatggcagattccaccgatgggttgaatacgtctcccgcaaataagacgagaccgtctctttcatccccccgatcgcccattccgacgtcccttaccctctcgggccatcggtcccgaatgtcatagagtgtcttggcaaactgtcctacaccgatatactgctgttcttgaggctgggttcctcgggtctcggggtcgttacccgctgcatcgcgtgcgtcgtgcccagccggtgcgttgtatctgatccgagagcgtaatcgcgccaacctcgatcagtgatcaagtccatgcgatgctgactagagttatactaacttttgtttgacgcggtacacatcgttgaaagccaagattggaagcttggtgatgctaccgacagtcatattgatattggttactcgtcgcactgatcggtgttgcagcaggacctcggcacgtcgagcgagcagacagctgctcgtagttcgaggaatcgttcgggttaccgggatatcgagcgaaaatcctggctttccaggtttcaattctctccttctggcggatcagtgcttattatttgaggcgccaacagggatgatgattatgttgatcagtgctgtggttcccgttttcccgtgaccaatctcgccagtagctagtagcgtttagctgacagcgatcgtgatatcgattcgaagaagctggacctagctggactgaccgctgagcggcgatgcgcgatgatgaatgccgctgccgtaactcgatcacgggaccataccattgaaccaccgcatttacttccgatcacgcccggtacaatcacccttttgtggctttcgcctcggatctcattatttcgacatttccccatcagctttctttccaagcttcacagattttcactactctaatcaaatggtcactgatcacgcacttgtttacaattgacttacagcttataacttagaaccatatcctttgatcattcaagcgcggccagccagctacctccctctacatatcttcatcctcactcacatgtcaaagtccccaacgctcgacactcagctccgaccatcacttgacgaagcggtgcgtcaaagggctgagaatctcgatcgtcaggaaacgcccctctccatcatgcgaacttcttcctggaacgacctcgagtttgacagcggcggaaagcatcagagagaccagctgcgggctgaagcgcagtcttcgtgttcggaagccagcgtgttcccagcagactcagtctagcagacaggacaagaaaatgacgaattgtcagccatgtctgtaaacgcttcggtctgttcagcgggcgaaccaaattggagagcctatcgcagcttacttcataaagctggccttaacgaggtcgacaatatccatgttttccacaaacatgtatggagggcgtaagaggaacccgagccactagatgccaagttggaacaagagctcgtccacagactcgaggggctgggcaattggctggacaaataccaaggcttggtgattgaggcagacctgcaaagttttatgaatagaatcgtcgaagtgagggcatgtcttttctttccgctcaagcgcgtgcgagactgaccttttcgatgctctgcttaggcaacgatctcggacttcgagccggtcatcgtgacaggctcgagtgactggagtcacgtaccactctccttatcaggtctgaatttatcatgccctaaacctgatggatcgatcggatatccaactcgcagtgcagggcaggagactggacctttcttcgtgctcacgcccagcgacccagagcatccactcggtcaaagcgcgatgacgtccatagtctctgacagtcgaagagatgtggctccttccgcgaatttacttcccgattctgtgtaaggaaccggcagaagtaagaacttgcctgcaacaggcttacttgacactggtacaagggaattgggccaaagaaccagagatttatctgcgcaccctgcgagcaatttacaagctctgctcgcaagaaatccattccagaagggcgcatatgatgtcggccttgtgcgctacgccccgcggcaaggatgttcccaaaacctttgacgacaacggcagagacattcccagcaatttcgaaccacggcgatacggaaggcgccccaagtccgacgttggcgagccgcttatcgcaaacccggcccgccccgctgcgagcaacagtacgaaaaacgcgtctctcgacattccttttgacaagctcgaaatcgccgtctccgaagagaaagtttcggacgacatagtctccgacgataaaggttcggccaccatattgccggatatcaaaccgtatactccttcgaccggtggtgctagccagaaatgaacgccatctgccatagccgctacgatgatcacgactcgatatgaaccccttacgtttcccatttcatctgtatgtctttctctgctgtatagcgttgaacttctctacgtcctacaagctgggccccaggtccgcaccttagaatcgaccgctcggaacttgcggaagacctgtcgaataccgaaagatggatcagcctcccgccatcgagatgatgatgaatatatctcgccttttcccacttctttcgctttcgcaccctgttccctggactttgcctcccgctccaacatactgaagattccgcgatgtagggcaaactggcggtgtttcggtaaaggtgcagcagaggatgaatctggaatgccgacagaggacgtcgtcgtgggcgggatgggtttgcccctctctcccttcgctttaccatctgctgtctcatccgtgccttcctggtccttttccttggtcttttctagacgtcgggcttctcgctgtttatgttcctcgatgactttggcaatatcttccttgcttggaccagcaggttcctcaagctttggtatcagagtcgcactaagagcgggagtctgcttttaagaacgcttcgtagactgttcatcgggaaggcggcttacaatccgctgtgatgatcacacgactcccgtatcaacactcgggttcggctgcggtgtcttcacgatcgtgtccacgcgacttacggatcgtccaggtgttttggacaagcatagatccaggataacgcatccagagtggccaagactgtcgtagtgggagaccgacagacatagcactgtttggctgttccgaccttgcgttcgtagtagacgttttgtaggggaggcattttgataatagtataggttttaccgcgtccagctttgttaccgctggactccagaaggccagaagaggtagtgtgggattttatgctcagggtgcaaaatgcctttgaacgtgggcatgctgagtatcgtacttgggcgacggggcagtacgggcagagctcatctagttgctattcgtcccacaacggtgcgatggccgatttggatccggaggtttggataaacttccgctgaacgatcggcccgccgaccgtcgaccggtccagcagcatagggcccctgaagtgagttctgaaccgttctaccagctgccagtcaatctctgcaggtaaagcctcgatatcatatccgtaacatctcgattaaaagtgttctctttgaatatgaatccagcggctctgatgtgccgattcacgcgacttgtcatcgccttcccccgtctgcgtacgaccagcaatccgctcgattatcgacaatcgatccatgctaagaaaggtttaagcgcgtccaggcggtacagcgataatcctcaagtccaagatcgtgcgtttgagacattgtcaactccaaacgagtccaagattgtcccgaaacttccaacatcgatcaagaaactgaacaagcaactagccacacggcaaagtccagatctacctgaagaagagctcgaggagaaattcgttcgaggtgacttcatccggatcactgcagccttgaggcttgattgttgggctgaaggtgtttcgtcctatcaggtagtggccctggaggccagtccatcaacaagacatccaacgctgtgagaatgatatgctttctaacccgtcaggatcccgactgactgatcctccatgcaggtttccttgatacacctaccgaccggaatacgaatacaatgccaagagacccgatcactacaacacaatcgaagactagcccgacagatcctgcgggacaaggtccgttcgttcgaggccgttcggtaaaagcaaattcgagtcggaagctgatcatgcaacccgacgattcgtctccaggtcgaacagcatctctctccaggcaactcgaagcaagatatcaagtgggaaaaggaacgcaggagaaagctcaacaaggcaaagaagagcaagcgcaagaacaagtctgggacagaggagggaaagccgaccagcgagttcgatatcgatccggagacttgaccgaatttggaatacataaatgtcgtcctaacatatacactgcctgttccttcccatttaggccgatggagtggtcgtcttgccctggtaagcatcccctaagagcttgacgagcttgaccatcttcctctccttttcgacccgcttgagccccctgcgcttgttcaaatgttgtcgctcctcctcgcttgtgacccaatcctcggcctcggctccgtatcgcttaggattcaagatgcctgccggtcgcgaccaggcgttctgcacatcggacaagctcaagattttcgactcgtggtaccgggtcttggcgagatcacgctcagcccgagtctcagaggtgatgaggtggaccgattcggtgccggatgagatccgggccagtcgatcctggagcttggacgtcaatgtagcgttggcgagttcggggtgttgaacggcagggtccatgaggttgtggtttaggctccaaacgaagtcgttcgaggtcgaggtcgaggaggaagaggcgataggggtcgaggaggaagccggggtcgtcatactagctgacgaggaagatgcaggggaagattttgacctggtcctctttgagacgagcttgtcggtgatcatactcagcctcccagcgggattaactattcgcgcctgggggtattggaggtggtgttgttggataatcgagttggcttccaggacagggagtatccgccttttcagatcgctgtagcagaaaataaagtcgagagatcttgagctcgattgacatcatccctgtgcctcggcgcagactaaacaactcacgtcttcgtcctgaacacctcgtgtaatcccaacttgtcactggcaccttctccttgctgactcgacccggcgttctgtacattgtcgctgatacactttgcccagagttcttgagtcgtcaacgggcccgcacgaagggcttcgacgatgatgggtgcagcggccgggacgagcgccgtggtctttcgagcagagtttcgtagcgccatcgtgatggatctggtctggcgactgtaaaagagttcactggagaggctgtagagctataaagttgtcccgtcgcaatatagagacgaggatggctatcgaccatcttttgctcttccccccttatgccgaggtcgatgggtgcgaacgcgcttctacttgacccgcgatctaccaattctctcgtaatttaatgccgtcatttcttgccatcatcaagcgcaacagggttcaaagtggaggtcgactcgctagtagctagttagctagtagctattacctttgtctttcgattgccattcttatagttacaaagatacagaagtacacttcttggatagagtatctcacccataatagcatgccataagagtcacagaaacgatagagaaatatgccaatcagagtcgatcggaaagactcggcaggcattgatcctgcggcgtcgaccggtttgttcggagcccgtccggaacgcttgtctcaagcagagatcctgaagaaagaagctttcaggctagtaagtcaagagccttgcgttcggggccatctggcagcatccattgatcctctcttcgtgccacagctcaagccgaaatgtgtacctatcatgggcattcataccttcaacccctcgacataccaacatgacctgtccttgctcgatgacctccactcgacgctccagatgatcccagacgaagcctacgtcccgtccatcatcaactatgccatcttcccactcacccatctactgcagcgcaacaaccccatcagctcggaaacggccggtaaaggtcgaataccggaccggatcctcgagaggctctttgaatgccttacctttctcatcgagcgttggaaacgaaccatcaacgggatcgatctgaacatgtgggaacagctgtggacgctctctgccttgctcgtcggtggacctctgcagactatggatccgaagcgcatgagacccgggtctagggcgacaaaaggggatcaggacaaggggaaaggaagagcgttgagcgaggagagccagttggcagttttgagcctcatgaaggcgctcctggagccgatctcggaggacaaccaacaggtttcgggtgaaaatgaggacgaggaatcgtcattcttgcctctcggcaagagggatcatccgacgtccacccacctggatctgctgtgcagctccaagatcctgcctcctatcctcttccacaccatctcctcactcttggaactccctttaccgccgacagcatcgcctgctatacagaccgagagcctgggaatcgtcagagacctagtgatggtatacatgaaggacaagatagagatgctggccagcgttatgccagggatggtctcaaactcgatcaagatactgaccagcggctcaggcggaggtgggaaacaggtcagggaaaaggtcgccctcgagacgatccgattgttacaggccatcttggtggaaactctcgctgacgaggtcatgatcggcaaaggtgtgatcaagaaacaggctgccaccctggacgagctggtccaggaagtgaacagcgcagcagacggtatcgacctcgaaatcttgacagtggcagtcgaaacgccgcctaaaaccgcacgatcggacccattcccagccttgacaccgcagtatcttgaattcacctcgactcagctgtcggtctcgttcaaggtcatgctaccgacgctacgcacgcatacctcggccatcgtccgacaagcgttgatcgatctctgcgggacgcttctgcgcgaatgtaaccgttcgctagcgaacctgcagatcatgttcctcgaagtcctcttgcaagcgacattggacacgcatgagacggttgcgaactcggcactcaatgtgctgaaagatctggcctcccgtgctgagactacaggacccgtcagaacgagactgaaggagattgccaacaagaccttggctggattcccgagcaccatcatgtcccagtccgagtccaaagctctcgacgcgacccgaaccatgaccgcgttgtcgagattcacggcgaaagtcgctcacgaaagctcagccgacctcaggttgttcgatgatcttttgggcccgaacggtgggatgcaaagatgggtctggccgttgttgacctgcttggaactcggtcgagtcaaagacatcggtacacaaggatccggatatgcggacagggcatgggctatggctcgactaggatctagttatgaatatctcaaaatagaaggtgcaaggacgaccagtgccggagactctaacgggtatggcactgctggcgaaaccactgatcgtgcggagctcaaattccccgagttgtccctcaagagagtcgaatcgccggctctactcggggcgattggcgaaatgttcgagtcaatgggcatggcagcgggcttggacgccctcaatgccgtcgagcaattcgtaacgatcgcaaaggccaagagggattccgcggaagtgccgaaggcggcatccgcgctctgggcagcggagcggatcatggcaggtttgatcacctcgaagcaagttgatgaaaagcgattgaggaaagaggcccggtccatcgtccggatattggtactattcgacgagcaggacgatggcatgaagacgcccgacgatgttgggcaggatgagaccgtctcggacgatgtcatggtcgtcgaaaagaaacaagggatcaatgctctgacgaacctcctcaagcgcgatcatcggggaaataagtcaaccgagcgggagaatcggacccttcacattaaagtccaccgcgagctagtgacggcgttgtcgctctcgctcatggcaacctgcgcccgtatcctcggctcttcattcagacccatgctgctgaacacgctctacatcgttctctcgcacctcggatcacctatcgcattgcttcgcggctacgccgaaatcgcgctcgttcgcatcgcttacgacattggatacgcctcgccacagaacatgatcattgacaatgtcgactacgtgatcaatattgtttcacaacggatgacatacaagcgactcagtccgctcgcgccgatggtattgatctcgatgatccgcctcgttggtgagccgatcgtaccactcgtccaggatatcgtcgacgacatctttgactgcttggacgactaccacgggtacgagctgctcacttcgacaatgctcgcggtactcgatacactcatgcgcgccatgaccaacgagaccgacttggccgaatggaccccgcctgtgtctacctctaaaaggctgcgaccaggaccggatcctgcaaccgatttcgcagcctttgttgattggtacaagggccgagcgacgagagctgcagaagctgtagacgatttcatcaacacgacgccgaaggagccttggaaacgccagagccggggacatgacggggaccacgatgatgacgaccctgatgaccctcccgagaatgcccgagatgagccagagattccgccgactcgcgctcaagaggtctgcaaacgcatgatggagaaggatgtctactttatgacccactcgtcgccatttgttcgcgcgcgggttttgtcattgtttgccaatggcatcccggtcctagtgacgggcagtcgagagtctgatttgcttccactggtcaataccgcttggccttatatcctgaatcgattgcaagacaaggagccatacgtggtgaccgaagccgcggtcctgctggaagctttggcaagatgggtcggggatttcatgtcccggcgtattctcgacgatgcgtggccgatcctgaaaaagatgttggccacgcaaaagcggctcgacgaacagtcggctctcctcaaacgcggccagggcggcaaatcgacctcgtactcggtctcgcataggctacatctggcgatcatcaataccatgcgatatatcgtacaagaagtcccggtcgctgacagcgtcatttgggaaacggccacgctatttaggccattcttggacgagagggcgcatcaagaacaccaggatgcgacgatccggctgtatcgtatgctcgccaaacgtgacgaagacgcggtttgggtggtcctgaggggaacgatcggggagacatctgacgccaagggcaagctagcctatttacgacaaccaggattgaacattcacgacaatgtacgactcgtctttggaaacgattaggacgtttacgaaagaaacttgtacacaccatgaggatagatgtgtaccgagctgaaataggccactcctacgagttccggcagcccagcaaccatcgtgttgtgtcgcagggtgccgtgcgatatggatcttttcggtttccttgtgattgcctgtacaataatgtcgtctatccagccggggccttacaagtacagtatgctacagacgattcctctcagtctggcctatctaaccctctcgagcgacctcctcgaggctctccttgaagatcttgcatgcgagcgccatctcgtccttgctcacgttcaacgcgggaatgaatcggatgacgtcaaagaccgaggttgtcaggatgagcatgcccttttcgagacactttttagcgaccctcgagccgatatccttgacgcgtgcgcccttttggggaacggagcccggttgcgattccgacttgttggcaccgacggcggcgcccgagatgatcgaagcggccgagggaggttcggtgaacggggtgaactcgacgctgcgaaaaaaaggagagcgagtttcggtcagtcttgttgatcctcgtgagatcaactgcaaatcagatgcctgcttacccgaccatgagaccggcacctcggacatcacggatcatgtgtccagtcaattcagactgttgcaattctcgcaaagcgctgaaaagctgctccgacctgtgtaacccggacatcctcgttagcctttccactgaatgtcgaccggtcatcagcacaccgtcgcgactcgcctggcgttgacattgtccaaaatgttctccttttcaaacgtctccaacacggccattcccgcggcacaagccaaggcgttacccgctatcgagtcccgtgcgatagaccatgagcgcacgtcctcttccatcgacaagacgcaccctcgatccgaaacggagcgggggcgtctctctctctctctctctcgacttacaatacgtcccacccatgcttcccggcttttgacccttcatcacgtagttcttggcgacgatggccgagagtggcaatccaccggcgatccccttggccatgatctggatatcgggaaccacgcccgagtactcggaatagaacatcttgcccgtcctcccgaatccggattgaacctcgtcaaagactataccgtgcgacgcgcatgtgcgggtgcgggtcaggtcggatgggggagtgggacgaggaatcgatcggaccaggtcaatttacggcaagacgagggagcaaacaacgatccaaccctgggctcaccgaggacgataccttccctatcacagacctctcgcaaaccctgcaaccaagccttgggcgcgggaacgtacccgccctctcccagtacgggctcgatgacgatacacgcgacctcgtgcgccgggatctgttgcttgaacaggagggccaggtgggagagggagagttcggtcatcttgtcgaccggggtatcggcggggacgtgcaactgggaagcgtaggggaacggggtggggtagatgccgggctatatacgagggagggtcgatcagcctcgatcgcgaggacggagacgaggtcgagcgggacttgcgagggaagcaccaaagttggccgagtagaccgtcttggaggctgggtcaaagcgtgatgaagaccatcgtcaatacccggcgtcatgcccgccctcggtccgctcgtcatcacgtactggtcatggcagacgtcgcataagtccttccatggtaactacctgtcgatcgtccgtgccgtacgcaaaccgagtatcagcatcgcccccaacaaggcgcaagggcaaggatcaggctgagagggtaagggggtggggggatttgactgaccttgcatgacgacgacaccccgtcggttggtataattcttggcgaccttgaccgcgttctaccatccacgtccatccgatccatcagcccgactgatctccattcacactgtcctggcccggactcacctcgacagcctcgctccccgaattcgtaaagaaaaaagtatccaactctgcactcggcatgaccgggatcaacttttcgatgagctggagctgggagagcgagtgcgcgatgttgacctgcgagtgagagattttggagatttgggaggtcacggcggcggtgatcgctgggtgggcgtggccgagacaggtgacgccctgtgtgtttgtgtgcgggttgggtcgcatagacagacaggcggggatgaggatggggaggagggaatgggtcgggtatggtcagtacgaggcggaatgtgacgggtcgggcgatgggggtatgcttacgattccagaagtgaaatccaaccatttcttaccatccgtcgtccacacccaagttccctctccccgttcgatgacgagatcgttggaaaccctgccgatcccgggggtgatatgtttgttaccgaaatcgctggtgatcgaggtggacatggttctagcgttgcggatggacgtgatcggggtggcaggtcggataaaggtggatttggggagcgttcggaggatagaggcgggtttgaacatgttggctggaaagagggggttttcttttcgtttctgattgtttgcgagtggggtgcgggtatatgtaggtcgagggtgtgtagtgcgagggggatatgattatatccttggcttttgtcagtggtcaggggcattcccccccccccccaacctttccacagccgagtcttcatggagaagaggatggcccaggaagtcccggccgattcgctcggtgacgagtggaagggatacgtcttcaggatcactggaggaaacgacaagcagggtgagtttcgagttcgagttcgagttccccccagaggtcgaggttgacgccgatactgatggtcctacacgccgcaggtttccctatgaagcagggagtcctccttccccaccgtgtccgactcttgttggccgacggtcactcgtgttaccgagcccgtcgagacggcgagcgcaagcgcaagtctgtccgtggatgcatcgtcaacaccgacattgccgtcctctcggtcgtcatcgtcaagcagggagacaacgacattcccggtcttaccgacaccgtcctccccaagcgtctcggacccaagagggccaccaagatcaggaggttcttcaacttgagcaaggacgacgacgtcaggaagtttgtcatccgacgtgaagtcaccggcaaggccgagggtgccaagccctacaccaaggctcccaagatccagaggctcgtcacccccatgaggttgcagaggaggaggcacttgcgcagcttgcagaagaggaggactttggcccagaaggagaccatctccgagtaccacgccttggtccacaagcgtgccgccgagaagaaggagcacaacgctgccgtcaaggccgcccacaagaagtgagcccccggcgtccgcgcatcgaccggaccggaccgtccttgctgaccatccccccccccctgggtacttgaccctcgttgcgccaactcgataggcactagacgctttgttcccatgatcaaacaaggaacaattcgaccaaaaacgcccggcttcttctccccctccctccccctactcttctctctcgctcgcctcacgacctactccaaaactctctctccctctcgtttgcccgtgtcactcccggatgatatagtcgacagacaatggcgcgggttcccgggcggtcgactctttacgtggggtttggccgtcctgatcggtggattgttgtcgattcggtagtatcatgggagattatggaattcggatggggttttcaacgatcgtggtcttggtggtcgtgttcgtcgttcgggtcaaatttccgtggttcacaagtcgatggcgtggaccgtgctgtgaggtcaggtcgaggttcagtctgcgtccctggctctcgaatcaatcagtgtctttgggtaccgagcaatcacatggggtcgtactaggaggtgcccagagtagatcaggacgggagtaataccgacgataatgggcagtcgagatggacgtagacatttgatcgagattcttggcgtttcgtttcgatctttatgatacaagtctggtaccatggaacagtaaaggcgaagctgtccttcgagcttgacgtcgggacagacacagatagccgtgcgatcgcctttgaaccatcgatgataacaaggaggaggcctcggcatacgctcaatcgagccctcccatcttgaaacaacgggcatcgagtcgagtctgtcagggaaaagaagcgcagcgacgtttcaggctggccctggcccttcttgtccggcatggacggctcgatctacggatctgatgctgtacgtcggattctagaacaaggacgatcccgaagtggcgaattatattgaaagcatcctgtcgagagtattgagatcgcccggcgcttatcatcactatcgtacaatgccagtggagtaaaaatctctagtcagactatacccttgccctatctgatcacatattgctttcactgccaagccgatgcgatcgccctgtccacatgcgcggtacactgcacccccgatttcccggcacgtccctgctcaaccgcatctcaacatggccggtgacagtagtgtcctttaatggcagatgaacgcccatcccttttccagtggtgatagaaattgaacctgtccatctcaagcctgagaaaagtaaaacacgaaacttctttgaatatcgttgagattcaaagctgcgttttctggcatgcacgattaatgaatctgatgcacacaggcgggcgacgtagcacgtaccacgaagaatgtactcattgatcggctttgatctattagaagcgtagactaaggtgttccggtattgcgataaatcagggcaagcggtcttgctcgatcgtgatgtgacgaataaactgggaaccagtactggcttttgtacgcagacacttgtaaactcgcggcgggactcggattcgatgtcgacgacggatcgagcttcagtaagacgccaagaggatgatggtgacgggaatgttctacatgatctggcgctcgataaagacatcgttacgacatggacgtgtctcgcctagcgccgcttccagagtggcgaatctcgacgagaaccgttgctgcacgtctcaaagcacctctgtgactttgtcgaggcagcatgtcccgacaaagtgaattatgcgcccgattaagaggattgcagcgatcgcttcagaaagtccgtatcttttagggttgagaaatgtcggattatcgacagcaaggaggggtccgttcatggcgctatccattctcatcgcactgaaatggtacgtcttgtttcttgccaagtgttcggtagatatcatatcagggcaagaccgggtttcgcacaggtgaatcaggatgccagcataacgcagtgtatgtatgatagggggagaagctcgtggtaatgcaagtgtgtctatcgctacaaaggggtatggtcgcacagtcacaccgtctacttttgtgccgtccaatgcgcctttccgaaagtcgcggcgacgaccagtgggaataccaaggtcgcatccgcgtatacctgcacacagtacaagagcaagtcgaaccgattcaacatcaacggtctgtaccgagcggtcagcccaaagatgagcaaattcgagacgcaccttgacagactctgcgcctgcgcgaatctttccccacgagacggcctcgtctggcctggcacccgaatccgatccatcgaattcctggcccgtgttgatatacaccgcatagtccgctccattccgctgcgtgacgcccagacgtcgtggatcagcatccttgactacaagcgccgggagagaaatgggcgctaccgatcactcacgaacaacatggcgttggcgatctgatgcttgcagaccccaccaccaaggacgatcatcccggcctttttcgctcggacactcatatcgttcagtcgtcgaatgtcgcccacgatgtcgatgacgagaccggggtttttataggtatggaaatagatcatgtctcccagagaaccatcggtcaaggcgggacagaagacggggatgtcgttctgatccgagacgtcgagtcgtcagtattgctagataggtatattcgagacaaccgagagacgcaccttgtaacaccaataatacacgctctcctcgtgatcgatctccttacccagccgcctgatgaccgagctcggtgtccaaaccattttcttcgcctcgtcatcgtcctcgccctcggctttgggcgcattctccgactgctcagccaccatcttgtcgaggatggggatcacccagtcttcaaacgcgcaatagttggaattgggaacgagcaggttgcctatccggttcaggccccgtttcctcaacccggctccttccatagcaaagtcacccaagacggtactccctaagcacttgataaagtcttcctcaatccctccggccgtggtgacgatacagtcgaccagcttgtgacgcgcgaggaaacagatgatctccctcagaccggacgagatcaggttggatgtgtacccgaggaacagtcgtaagggttcgtcgggattcgctcgggcttgacgctgtggtacccggtatgaacgagacgattcgataagaggatgaagagcgatcccgcgtcgttcaaggcggactgaccatctgctcgacgatctggatggccttggccatccccgtagcctgaaacccgatcttttcataactctcgagcaaatcttgcaagttgatggcggtatcaaaattgggtcccttgatgtgggtcgcatcgtccgggatggtttccgagggcatcaggacggatgcatgagcgtcctgcgtttgagcggtcgatgccgctgtcgttgagtttgagcttgagcttgaagcttcggcgttggtgggcacaatgggaagagacatgctgagaaacggcaacgaacgaggtcgaaaagtcctcctgtattctatggcaaggtgcaaactggagcgatagtgcaaggaagctgcgaagcggtcgattgagctttgaacatgatgaaatgaacatagcatggtcgattgcttctcccctctctatctgtgttcaacaattatgagatcacgtgatcaaatgaataagtcaccttgcccgttctacttgcacttgaacactcgcatagtcttgttacaataatctccaaacccctcgggctacaccccatgaacctatggtcaggtacgctcaagtcgtaacccatactctagagatcacacccgtcatgacctgacgagagcccttgctatccataacgaaagccggcgagaacggcatcgcctcgaaacacctggcctcctcggtccgtacgacattttaccacaaacacaacaaatccaccatcgcttcattaccaagcggaacggatcgataaacaccgtacttgactacacaatcgtctctgtgatctggcaatctggtcagcactgccacggctcactttcggatgacgatggatgtggatactccctcgactgcggccccgccaggcccgtctgtcgggaccgccttggccctttcccccatgtctcgcccatacggcctctacccagaaagcctcgtctctaccgaagagctcccaaacccgacccgggaatgggcttacgagatgaggcacaagatgcagtacgtcgcacgatcgttatggctcggttcatctcgtggcgccaaggagtttcaaaccctccacaggaagggggtcacgcatgtgtaggtcgaccctgctcaaccttccagcctggaaagtcgaggttgatgtcttggatcattcaactcgacccgtctagtttgatcttgagggatgcgagagaggcgttgtacgtgaaacctttacatccggcgtcattcaagtacaagatcattgagatgagggacgatcaggtgagtccagaagtgccaagccatccctcttcccaaccgagacaatggctgatggtaaaagaaatcgagcagaacgagaagattattgcctacttcaacccgtaagcacattaccaaaagtcggagagcatggcgagatggacaactgattcggacatcgcggtgatacagtgccatcaactacatcgaggaagccatccgtgacggaggctccgtttttgtctactgtcacagtcagtcctcgccccatcgcttccctctatgctgatcgcaggctgacatacgatgatgatgacacccgcggtcgagtttagccggaatcaccttggccccgaccatcgtcattgcctatctcatggccatctacagaaagacgagtgaagacgccattgcccatgtccagagtcatcgttattgcatctcggtgaagccggtgggtccaacccctgtccaaaaagcaaaagattgattgcaggggctgatcatatgacgccaatgcgaaatagaactttggaaaacagctcagggtgagtgactacgactatctcgagtcgattgtcgattcgagacggtgtctagtaaagctgatgggtgtcgcctcgatgtctcgctcgcaggagtttgaagcgatttaccaagcacaacgcgatctcgcttccaacgctcggcctgcgggacttcagaaagcgaaacgcggggtggatgacatgttgtgagtggtggccaccggctcgttccggttgagaagacctcgaacagagaaatgagcctgatccagatcgtctcgtcccttcttttcctggtatatggcgacgcagtgacgaagaggaagtagatatgaacgaaaccagacctatccgcaagttgagggcgaacgacatctggatccaggatggggtcgagaagggggaataccgaccctggctttgatatctggactgccaatggcgactgcgcacgacgacgaatggactgtggaaaggcccatctgccacgcggacgccgatgaagatgagcctcgctaaactagaattgtgacgacgaattgacgaccttggggtttcgcgaatgtttcctacgttgtgtcttgaatggcctccgagaatagatcgggggcgaattttgtatctaaatgttcgagtctgtatcgtagagcgatgagttcggatcgctgggattatccaatcgtattgagtttgttgatgtgttctcggtggcattgaccgacatgaccgaatttcagggctctagctcgatgttgttggaggcttgcattcccgcctacgaaacgtactcaacgttgaaacccgtcatccgatcagtctcgacgagcgtatatgggtgcgcggttaatgaatgcgtgggcacgacaaggctaccggcatggaccaagaattctcagctgtggtttgctattcgatgcatgtacggcgtgtgcggggaatgttagggttcatgatgttattagactttcttctggacagattgagccataggtggttcgaccattccttctttcagacagtccgaagttgatccgatatctaaacggcagtgttgagcacattcttgaccacgtcggaatacctttgctcgacgattaccacgcgaggcgtcacaaaacgacgaggccgtcggtcgtgaaaagagagacgatcccttgacttcgcttcgcgctgagtagaaggcgaactccgagtctgcaggtcgagcacaagacgggtgaaattcgactggacacataaagaacttgctgagctattttgaagaaaccaacgcactgatgctgctactatgaaagtcgttgaaacaggttgtcaaacggacctgttacataagagcatggacacaattgttgacggctggagggctggcaagatcgacttgttatgacgctagaccggtctcgaaaaaagatccccgtgccatgtgaaggcgcaccggttatcatgcgggagactgtctagacatcactgagatcaatttccacgtaatgccgacatctcgtaagcaatcatccctcaagtcagactgcccatcgagcatggccttgaccgatactttcaactgcaagcaaggtggaactttcccgagatttgctgggaccatcgattcgatgactgggcgaccgccaggacgtttagtgatgtcgacttccacgagctcgatagcgattcttctcacttgtcaacagttgttaatgccgcgggaacgtctgttgaatcctgtgcgagattcttcattgcatcgtcggtgatagccttgaccttgaaattgatcgaccagaactgaaacgagatgaccgatggaaggttcctatattcccgaggatgatgctgttccacgcctttcccatgtgatcactttcggctgaaacacacttttggctgcggcgacgacggggacgggggttcagaacgccgatatataaccggtggcaaggcaaggatccacgtgatcacgtgagtcggcgtcacgcgctgttccttgcccgaataaatccgatctctatggaccaatgagctcgagtccaaaacgagccatccaccgaattggaactcgtcgctcctgttcggcgcaagcaagccaacaatcaaccaacaccatccaaccaaccacctcgcccacttttcctcacacaaccggctaccgtttatataacccacacacacacacacactcacaatcacaaccacgtcttcacactcacacgccaccctcctacacacacacaaaacgtcgacttcccccctcatcgtctcttgcaacgccaaggtcgttcgacaagtcactctcattcactaagcacgtatacccctctcatcgctagtgacttgccccccaccaccgccaccaccaccaccaccgtcgacccccaccgaacactctgtctacattcaccatgttgacctctcgtttcggtaacgcctctcgtttggccacctcggccatgcgaatgaacgcctcgaggtcgatggcttcgatcgccgaccaaaaggtcgaaatggctcctctcgagaccggcaagggccactacatcaactacaagcggatcgaggacaacctcaagatcgtccgacagcggtgagtctcggtttgggaggtcgtccgtcctgcgtcaatcgaaatcgacgctgattccagacctctgcctatcgttctcgcgattcctctcgacttcatcactttgtcattcccggccgtatgcgacgtcttcgacgaacaacagattgaacaacgcccccatgactctcgccgaaaagatcgtttacggtcacttggacgacgctcacaacgccgagatcgacaggggtgtctcttacctcaagttgaggcccgacagggtcgcctgtcaggacgctaccgcccaggttagtcgttgacacgctgaaccgctgacaacagtaacgaggggtcgctgacgtgcgagtcttcggatgtctgttccaatagatggcgctcttgcaattcatgtccgccggtttgcccaccaccgccgtccccaccactgtgcactgtgatcacttgatccaggcccaggttggaggtgttcccgacttgaagcgggctatcgacatcaacaaggaggtttacgacttccttgccacctcgtgtgccaaggtgagtcgagattgacgtctcgcatcggctcggagctgaccctcgacgttttcctggctctcgtgtagtacggaatcggtttctggaagcccggttcaggtatcatccaccagatcatcctcgaaaactacgccgtccccggtttgatgatgatcggtaccgactcgcacacccctaacgccggaggtctcggtatggtcgcctgtggtgtcggtggtgccgacgccgtcgacgtcatggccggtctgccttgggagttgaagtgccccaaggtcatcggagtacacctcgacggaaagatgagcggatggaccactcccaagggtgagcacaagagcgtctggtcctccgactcgattttgaaacgcttttgactgacctcgtcgtcttgcccgctcgcacgatagatgtcatcttgaacgtcgccggaaccttgaccgtcaagggaggtaccggtgccattatcgagtactacggacccggtgtcgagaccctctcgtgtaccggtatggccaccatctgtaacatgggtgccgagatcggagccaccacctcggtcttcccttacaaccaccgaatgggcgcctacttggacgctaccaaccgatcccacgttgccaagtacgccaacgagttcaagcacaacttgcaggccgacaagggcgctcagtacgaccaggtcatcaacgtcgtgagtagagctgggacaggtctcgcaaattgctgtcgtgtcgagcgagtcggatctctgatcgcccttttcttctcgccgtagaacctgtccgaactcgagccccacatcaacggacctttcactcccgatctcgccactcccatctccaagtttgcccaggccgtcaaggacaacgactggcccgccgagctcaaggtcggtcttatcggatcttgcaccaactcgtcgtacgaggacatgtcccgatcggccgccatcgccgaggaggccaaggctcacggtttgaccaccaaggccaagttcaccatcacccccggttccgagcaggtcagggctaccattgcccgtgacggattcgtccagaccttcgaggacgtcggcggtgtcgttctcgccaacgcttgtggaccctgtatcggacagtgggacaggcaggacatcaagaagggtgacaagaactcgatcatcacttcgtacaaccgaaactttaccggacgtaacgatgccaacccggccacccacgcctttgtcgcctcgcccgatctcgtcaccgccatgtcgtttgccggttcgttgacctttaaccccttgaccgactcgctcaagggcgccgacggcaaggagttcaagttctccgaccccgccggtttcgagctccccgccaagggttacgatgccggtgagaacacctaccaggctcctcccgaggacaggtccgccgtccaggtcgccgtcgaccccaagtcggaccgactccagctcttgacgcccttcaagccctgggacggaaaggacattatcgacgctcccgtcctcatcaaggtcgtcggcaagtgcacaaccgaccacatctcggccggtggaccttggttgcgattccgaggacacttggagaacatttcccagaacatgttgatcggtggattgtccgacgagggccacgtcaacaaggtcatcaaccagtcgaccggagagtacggtgccgttcccgaggtcggtgccgcctaccgtgaggccggaaagccttgggtcattgtcggtgaccacaactacggtgaaggttcttctcggtgagtcggcgcgggagggcccatccaacaccgcacaactcggaaactgattttcgtggcgtttctgatccttcagagaacacgccgctctcgagccccgatggttgggtggtgccgccgttttggtcaagtcgtttgcccgaatccacgagaccaacctgtacgtcatgtcatgccttgggacccgaactcgcgtgacgagacgcttacattgcagacgtttctgaacacagtaaaaagcaaggaatgttggctctttggttcaaggacgctgccgactacgacaagatctctggaaaggacaagatctcgatcctcgaccttgaaaactttgcccccggcaaggacttgaccctcgagatcaagcacgaaaacggctcgaccgagaagatccaggccacccacacttacaacgaagcgcagattggtaagtcgtcacggttcatgcttcccatctcgtcgcggttcgctcatcccgaccatccttgttgctcctcgtctataggattcttccgagccggtagcgcactcaaccttatggccgctgctgcccgagagcgagaggcctcggctgcttgatgaaatagttgatcccatacgactttgtatttcgtacctaatgacttctgttgtacatggattatctgtgcccccgacttgctttgagtttgaagtttctgcacctactgcatgcgggtttgtggttggtctgactcgaatgtacactcactactgactgccctgtgagcctttgtctgaactgagatgtaacagtattgtagccgctgtttcgacgcaacgaaatcacgtgatgtacgggtcaagtgaggttcctcttttgcggaagcagtttcgcttaggatcgtgattttggcctagcggtcagtaggtagtcgaccaacgaaacgaagaggtgttgatgcctgaaagctgccactatagtcgcaacatcacaagcttgcacacctcgacaagcctcgagcgcaattcaaattagcaaggacaaaacatagtgatcacacgatgaccgatattggcaccccgacggctttggcggcgttcccttcggcatcgagttcttcttcaagcagtcacatcaagctcgggcgtgtctatgggagcgacgaaactcaagcggtagctgctgtgcaagggggtgcagtgtggatctacgatgtgagccgtcaatcgggaatttctttttggcgggacgctcaatgagactgggcatgcgttctccgctatctaggttacgagccaccaggcaataacgtcattcactgtaccaccttcgactgtattccaaacgacacccatcagctaccaccctgccgtttcgagcactggcgaagcaagctcggtcgttcgtaaaggaaagcaaaggcaaaggtacacggcggtcgcagtcggtaaaggggagaacatctcgcaagccgatgagggcaaggtgatatgggtatggaagggcgaagaggtgtttgagcagtccacgttacgagtaggtcgagcctcatgaacggggtcggggcattccagatactgacgatcaactcccatgtgggattagttggagcaccaagtcgacctgctgttacggataccggaaacgcacagcttgctggccgcttcatcagcaggcctcaccgtcatctcctctgagctcaagacgaccctgattcccgtcacccgacccaacaagtcattccgactcgtgcgcgtgtttttcctgccccgagtcccgcacaccgagatcttcgtctacgggctgttgttcgacgacggaagcgtaacctttactggaatcaagggggccgatgatgaggcatgcacgtcagaggacgccagacgggcgaccaagtctttgcctgcaaagacgctctcgaagggggaaaaggtggtcaacgcgcacatggacgacaagacgctcgtggtccacctcttgagtaagcgtggtctcgaatccgttcttggtttcagaaactttctgacaatcgctcgccaatagcttccaagggccgaatgatttcgaacgctctctgcctgaaggccgactcgacgatgaaaccgggcaaggatttcactttcaacgaatcggtctcgtcggattctcctctcatcgctgctttgcccgacaccgctggacccgtctttgcttttgccactgccaccccttccatcgtcgtcttccaaccgacctatcccgctgtcctcgctcatcgagagatcagcacaaagaacctgagcgtcaaagaactcgtaccgctcagtagcaacctcgtagcgatcgtcagcacgacgaccaacgagtcgggcgccgagagatggatgatacacacggtggatatgactgtccctgtcgatggcgttggtattgctcagctgctcgactctgctaccttgactactcgctacctgaccagcgcctcggttgcaacacgcgaagctcagggcaaggccaactctcaagactctttgctagctacgaccaaccgggatcagacgttcttggcttctctccgatccaagttattcgccgcttcaaacggggatgctgagcctgccatgaaggtctggcgcacttggaacgagaccgaggagcaccctttcacgaggaaacgagccgatcccaagcggatccgaagtcgaggtgtcctcgccgcggacgtcatcaaggtcgtcatggagggtgcattgcccgctagtcgaacggatggcaaggaaaagtcaaacgaggcgggacaggacggagaccagtcgaatgaccaggccaagtggatcaccacgggtgccaagggcccgtatctcgccaacgtgataaccgtactgctcgaaaatggatgggcgaatgacgggatgtggggtcgtgagggactcgtacgagatggattgttggttgttggggattgggtgagtacccagcctttagtaatgggttacggaatgacaagcaattgatgctttttcctatccaggacaatatcgttctgggacttgaaaggctacccacggttccctcgaaatcgctggtagctctcctctcccatgtcgcacaatatcacctctcccctgataccattggcgcgaccggtctgacgacacctccgacactcgatgactttctcaagacctacctcgccatccccgtctcgcccgccatgcacaagcaagcgctcaagcaggggctgactcaggtcgaagttgtgcagaccgtcttgagtctcatggtcaactggctggaagaggtcggcaaggatatcaagggtaaaggagtggtcggatgggaagaagacgaagtcaaggctcaatccagcagctattcgatcgaaggcgtaagttagcgttcagatcgacggtcaacgtccgcgacgatgcttatcgatttcgcccgctctcagctcgttcttcatacgcaattgctgctcgacgcccatttgcccctcctcatctcgcatcctccagctcaccctctcatcgcgcgtctcaagagcgccttggaacccttgctcactctgcaaacggaattggtcgccgctcgtggtctggtcgaggggttcgtgcgcctggcagaacaaaagcccaatggcggtgtcaagggaaagaaggctggagcgggcaagggcaacgccgcgggaagtggcggcgaggtcgggaaaaagatgtttggtgaatggatggatcctttgtacagcgtggacgaggtggtcctgtagcgaaggtttcgctatgaaaactcgccctccgcgcctgtgcttccatgaatccaatgacgagttggacaatgatgatcgccttttggcgaggcgctagggccaaggatatggtcgtttgtttcacttttggcgttgaatggaccgtcggcccctcgacgagaaatgttgcacgacgagctcattgtacatcgacatcattatcaagtatcgaacactgtctctcggtcgtcaccactgagccttcacgcggtcacgcgctgttcacttcagacccagatcaaactgcataacccgcatgatctcagaggaaccagtcaataccatcgctggggtacaagacagcgagacgaagaggcaaagcccaatcaacgatcaacagacagcctcttctggctccgacgaagctcacatcatatctatcgagcctcgttaacggcgctctctccctcactgatcggatgggtataggcaggcagctgatttacgtcttccccgctcgtctctagagcagctagagcagcgaagggtcgatcgtcgcgtatcctacgtatctacaagttaccgtaaacccgtaaatgcatggaaatttgataccagatcacaaagtccatcgcttcactcgctgtcggtccctagctgttttgaacttgtcctcatgcaaagcgcaatggtctgactcagggcgagaagcggggtgacacagggggaagcaagattgcatgatgaacgcgggtcacgctccgcatggtcatcgcgacgcgagccgaaggaacgatcttaccgccgaggccagcgtgagaggagggcccggccgaccggccgagatcccatggcggattcaggatctccagatcgagcgaatagaacaatcagtgagaagacgtctcaggtcgcgctgacaaacgaaagtgtgcaacgcagaggactagaggactagcgtgcagagtgctcagcactcgcgcgtcggcgtgtacgaaatatttagaaatgaagggaaaagcacacgtataatgagacaatcagggtgggtcctcttccctttatccctgacttgttcgcctggcggccgaacggttttagtttcgacccacgtcgacattttattttgctcgagcatcgtcaagcgcgtcaagatgatcagactttatggctcgtggctctaatggccgcgtcttcatcagccaaatagccacgatcagactatggtttcgatccgctcgggatcaggtcgtgatcagcatcctcttgtttgcgaccgatctttcgcaagccttcttcgccatgcaggagccacacgggatttattacctgatcggtttctctccgattccgagggcgtttttccgcagtcggcccgtgacgtttcggccgctgtgtatgatgccccgttcagcctcgtcgatcaggacgacgttcaacagaaatctcgactgcggaaccttggacgaactttagcgagacggtcgggcgtttaacaagacgacctgcgacgacgctgctctgtcgagggacctgttgttagcgccatgatgtcccgggtagttaccctgatcctctgttcctttacctgtacgagctaacagggtttacctgcgaggacatcgtccttttttcttccttacggcggtcgtgtatcggcgtaacgtatcgtggtttgactagcttgtaatgtcgagaggaaacatctacgcatccctctgtgatgccatcctccatctccccctgccctccactttccgcttctcgcgatctgatccccctccgccttgcgggtatcgtcatagctcgatagaggtggtagtagtagtgtgtaatagtagattccgtctcagaatccatcaatcccccaccggtatgtgctcgatcgtgacacctgtacacacctaccaagccgcaagtctcacaagcttctggatcgatccgagctgttctggctctcttctttggtataactgaggtcggttcccagctgcacaccctggcacccaccaagcagaattcacgactcatctggttagtcagcaacaaggcacgaactataaccgctcctggtagtggatctccctctcgtccccaccctcaatcgggtctctccgcaaaggcgtccgctagaccagcagaccttgaagccaaatgtctggctatcatcttcaagatgggcagcaaggctcggctccatctggtagtcaatatcaacctatgtcgtatcacccgtcgcaacatcgaccgaccttgcaacaccaaggctctcaccaataccccatggaagtgaacaactacccagccagttcgatacaaggctatcaacctcaatcgcaggaacctcacgtccagaccgccggaacgggtaggatgagcaattacgggcagaatcaaggttacgacatgcaccatctaccgttgggcgcacctgtcaatgtgagctaccgcctcgacgatcgttttttgggttatcgacgatcctgactctttttgtcttgccgggacaccacaggctaattacgcatacaacccttcgctgtctcatcctcagtattcgcaacaggctcatcaagcacagaatgagcagcgatacccccctgcgcaatcacaatacgatagttccttctcctatccttcttctaccatcggctctacccgtccgatgcaggactacacctactctgacgtgcataaaaccttgcctcaggctcctggaaatgatggatcaggttactcgcaggatcaataccagaaccagaaccagaaccagggggagctcgacgctttcgattatatcaacgaaagccggtacgcctcgaccgtatcgacgcctttgccaggagccacccagtaccagactcagcagaatcacggacaaggtgctggatacgtggcgggccttgacggtcacgaagctgccggcgtgacgggacacgacagtgggtacggtgatgacggttcggatcaatggaaccggtcagcatatgccggaagatcaggggataatcagcaatatcaagcacatcagcagcagcagcaacaacaacagtctcgacaggccacgtcgggttacaactcttctgatcctgccgctgccttgtttgtgcctttcgctcaacagcgcgctaatagaggtacgagcagcgtacaaggctactctccagaacctccatccgccaggtcttcgggcaatccaatgcaagatgctcaacgagacgtcgggaggaatgctcattaccctcatagtgcatcagacgttgcgcaatcgcacttttccgggtcgacatcgcccaacccgatcttttcgcaatccggacaaggtggaatgcgaccttcctcgttgtcgcattaccaacaaggttcctacgacgagcagcacgcggcggccactcatgtccatcctatcaacgccggatttggcatgccactggcgcccgaagcattgcaagccgcctactctgctccttacccgcagcatgggtcacattctcagatgcaaaacaggatgccccaaacggaagcgcctaatgagcgtacaggaccggttaagaagcagaaaaagttcgagatcgacggcaacgacgctgaagccaaccgacccgtcgtcccaccccctgtcaagaacgcttgtttatcctgccgaacgaagaaggctcgctgtgatggtgtccagccgatctgcactcagtgttcgagcaaaggtcgggaatgcgtctatgtcaagtctaggcgaggaggagcgaggagacgcaaggacaagtcgctgaacgttccacctcctccgcctagcgctcttaaagagttcctggctaggctggatggtttgcaagcgcctgggggcgaaccgcctgaattggacggtctgagcatgacaagcggtgcagaaggcggtgctacaggtccggttgacccagctatcgctgtacgaagctatgctccggacgatgtggatggaatgtgagtccatattatttactgctcgtctcggtttccgagctaacccggcaaacttgtcgacagcctcacctgctattgggaagagattcatcctttccaggctttgctgccgcccgtcaagcacaaggaatgggtcaagcagaatctgatgaacgaatcgcccttcttgatcgccgtgcgagcaatcctttcccttagcccccatcccaaggaccctaatcccaagtcgctctcgtcccgaagtcttcgtcggtctcaagcctctcggctcgcccgcgaggcctcggacaggatcgacgaggttcttactgaagtcggcgacagcgaagacaggtcgatcgtcattgaatgcgtacaagcgctttctctactcggtttgtacgagtttgcccagaccggtaacgctgtcaagaaccggatgaagatgaaccaggctgtcgagcttgcgatggatatcggtcttcatcaggttgacaaagctacctttgccaacaacaagccgagggatactcagtcaggagggcatgtagccaggcctgcgccgggcaaacaggtcgagggtaaagacatccagaaagacatgcaaaggaggacttggtgggttgttttcgccggaatgcttatctctggtctagttgctggtcgagtaagtcaccggatcaatgtcaccaaatcctgtcctgtcgaaccccggcttacccgtctcttacgtccgtagcgtcctatcgtctcgcacgatgacaagcgtatcatgtccgactatccatctacggttgttggagacgatgtaagcggaaagctcggttcgaaaatgtgctttcgtcgctgaataggttccgtggtatagtcttggggcatctggatcgagtcgataaggctagcctgtcaagcgatggacttgatcatgaccctggactacaacttgcccaacccgaatccctcgtctcctcctattgatgccgagctgtcggacgatgagatggccgacatgggtccgcaagagaaacaagctgcgaaggaaaagaagacgctacacaaacgtatggtcaagctcgaccgatctgtcttagatctacttaaacagggtgagacaatggcggtgattcctctcgttccaggaggggaagaggaagttgtcaggaatcaacagctggccgcgtcgatgatgctagcagtgtaagctgtttctcgctcgttcagtgacatttcaaaagctcaagctaatctccctgtcatagttgtcatatacaacttcatcgcaggcaagcgttcccggaagtcgccttgttctcgcggaaaatgtgcggattacccaaggcggcgattgagaacaacagcattccgacccctcagcagtccatatctggccacacgggaactcaggaatactcggacaacaattcggcttatggcaacgattcccaacatcttagctctgttactgctagcagcctagctcccgcttcaaatgcttctctcactcgtacacactctcaagcgcccacaattgacaccccaaccgcgttgggtgcgagctccgatgtgaacaccttgccgctatcccaagaggccttggcagctatgaacaccatgaacatgtcaatggacgggttgctctgggacccatcgatctacccggcgtctttccctacgccctggttcgaagcacccaagcgggctgccgagttgtatcaacctctgcaagagactcctgcttggctgcctccgctcaacggatacttcacggcaggtaccgggtacattggtggacacctcgatggctttgatggaatgggattctctacgaccaatatgccggacgtcttctcagcagtaccgccttccatcgcgccgcttgttcagtctatcaccggacccatcaagacggacgttccgccagctgtgccgcctaagactcacaaggcatggggtgtcgacatcgctcgtccacctctgcagctttcattgaacaagcctgtcagcacggtcgacgccgaggacgatgccgaagacgatctggaaagcactgaagctgttgtagtcggacctgatggtcctttccctccagggatgagtttggcgagggttgcacaggcagctcacagtcagtctattcggatttgcgaagaattcgtcgttttaccatgctgacgttctacgtgcttccaggtgtcatccggctggaggtgctacaccgaagtgcgactctggcattgtgtaagatttcccagttcttgtttgaatgatcataagactgatctcatcattcaatccacacagggaaagggcctcctaaatggctgccgttctgcgcatgcgtgagttgaaactatgggtatacgtgctcagagttgtcggtatctaacctgacaactgctcattgtagggtctgttgagtggagcatactccttcctgctactgtccttggcggtacaggcttcatctttctccgagtctgaagagaagccacagacggaagagcttgaggctttgatgaccaacgtcaaggtaatcttggccggtcttgacgcctacggaacgatgtgggacggtatcgacatgatggccggtaagttggagaaatcgtcagcacctagaagctgtatactgacagtgttcctgcaccgtccaggcgaagtccgtgctgctcttgacgctgccaagaaattgcccgaggagattcgcaacaattcgctgtcccctaccgcgacgcaatgattcagacgaagcttcgactattccaacgtccagaaaaaataaatacacgggaactctattagcgcactattcttcatcattttgggtatctgtcacttgtatcaatctgaacatccacaaccataatctcggtcaaatagatccaagatttccgttcgatagcggtccttctgcgcctcgatttgcgtccgaagctgtgacgcgtggttgcgaatctctgaacagactgtaggagtcgcaccaacagctaattcagctaatatccctgccattcggatcatagggcacctcgaaacatcttgtttctatacgtagtagacgtgctcacctgatcttcctaggatctgcagggcttacgtgcaggcgaccaagtctaagcgttccggaataccgtatgcgaggccggtcttgaaatcgaattcgttatgccagctgcatcgccgtcagatacttctccagaagatgaggagttctacgcatcgtgagtaagactgtccctcaagaaggatgatgactgacaaaaaagaacatccctggcaatctctttgacgcattccagatgggggctgtaagtgggggcaagccagcggttggcatcaggcacagtgttgaccacccttctaccggtcgaacagctgcatcctctgcgtactcctcatcggggctcttatttgctcatactacctgcaagtgaagagaattcgagcgatccacgagacagtggtgtcaatctttgcaggtgagtctgcccgggcccatatgagggagatgccaatacacacgagtgttcacgattacctcacttgctcgaagggatggttgttggcctgatcatccggctatcacctggacatcttatcagagagatgttggtgagtcgcctcgctcgctcagtgtattcgaatttttgctaagacaaagcgctcttgatccagtctttcaaacacacgctcttcttcaacctgctgctaccgcccatcatcctcaactcgggctacgaattgaaacaggcgagtctcgattcgagattcatgtgcgtgcgatagcccagctgagatcgggatatcttgttaggaaaacttcttccggaatttcggcactatcctgacattcgcttttctcggcaccttcatctcggccgtcggtttagggtaagccgctctcgattgagcctgtgcttctggctgcccactaacgtttttcgctactgatatggatactcagagtcttggtttacatatggtctttcctgggtctcgagggtctcaagtttaccttgctcgagtgcttgatcttcggttcgaccttgtcggcaaccgatccagtcacaattttggccatcttcaacacatacaaagtcgaccgtatgttcgcgatgggatttcgggtgcaatggtaatgaagctgatgcaaacttgctcgacacgtctgcagccaaactttacaccatcattttcggcgaaagcattttgaatgacgcagtgtcaatcgtcatgtacgagtaagtacaagtacgagtcgcccagatcgattccaaatcgactcacgttccatggtaccagaactctgtcgcaattccatggcgaagacatctacctctcatcgctgtttcatggaatcggcatcttcttgctttctttttccatctcaatggcacttggagtcgtatttgggttgatgtgctcccttggactcaaacactcgaatctggctttgtacccacacatcgagagctgcattgtctcgctggtggcatattgcgcctactttttctccaacggattgagcatgagtggtgagtgtacgagagtcggtcacgtgccctgtctcccgccgttctaaccgtttcgctgccaggtatcgtgtccctgctcttctgtggagtaacattgaagcactatgcctaccacaccatgtcggtcaagacgcaaaagacgaccaagtatatgtttgcggtcatgtcgcagctgtcggaaaacttcatcttcatctacctcggcctcaacctgtttactcaggatgctcaagtcttcaagcccttgttcatcattgtcacggcggtatgtctgataagcccgggtctgcagctgggcaaacacttgactgacaaacctctcaccccgatagatcgccgtcatggcctctcgatatgctgccgtctttccgctgtccgagttgatcaattgggtcttccatacccgaggtcagaggcacgaggagatccctcactcgtatcagatgatgctcttctgggctggccttagaggagcggtcggcgtagccctcgcggcgggtatcaccggagacaatgccgacgccttgcgaacgaccatcttggtcgtcgtcgtcatgaccgttgtcatctttggaggtacgacggcgaggatgctcgaggtcttgggcatccgggtcggagtagaggatgatgacgatagttcggatgatgacggtggctgggcagcgcatggcggcaatctggcgctcgcgatgggtcccggcagccgaaagtttgcgggaaggcatccatacggggacgactatgacgatggttacaacagttacaatggatctcccatggaatctccttatcatccgtctggcacgttccctctggacgttggccgatcgaggagccaaccgggaagctctcgagcgggaccgtatggtcccaaggggaggcaggcgtcgaccggctactcggccggatcgagttcggattcggatgacaatgagcccttaccaaacgctcaagatatcgaacaaggcggcgggccggaagaaccaccttcggccggcatggtctttagggatggacagtggtttacgcagctggatgagcggtacctccttcccctcttttccaactctgtggcgagccgacggcacaacttgaaaaaggccggcaggaagagcagcaactatggcggcgacagctcacccagcgcgacgcggggaccgagcatggattggggcaaccgggaaggtcaattcggggacggcgatagcgagagcggcaagggaaaaggtccctctcgcaactttaggtgagaggcgagagagagagagagagagagcgtgagcttgagccgagaggaaaccccggctctcgaaaggtgtgtaggctcattccccctatcctttacccatcctcgttgcgattcggacgcggttctcgttggccgactatcaccacagcgagtccgtgacagatttcttctttacccgtcctgacggcgcgagctctccttccgggacggccagtccccccttgaatcacccgacaaccggcgctgcaggaggcgaagtgccgaatccgatgggcttgccgatgggcaacactaatcggagccgatcgaggaccgacttgaggtcgctggcgatgacgcagggaaaccagagtggtggacccaatacccgagagccgtagctctaagaatgcgaatcaaagtggtagaatagagactagagatgtcggatgaacgttctcatacggcggtgtaagggggtcctaaaagggtcccgcttacggtgacctgggatgggatcgagaacctttgtaacgagtacctgaacgctgtgtgtgactcgatgctcgaaatgaagtcgttgacggatgaccctatcatgggccattgggtggtacttgggtggtacttgggtgggtgggtcgagctgacgcgacgttgcggttcgacgcgtcacgagcgactgttgcgggggaagctagctagctgcacctgcctaactctggtcaggtgatctagacatccatctatacgagatgtccatgatctaatctacacctctgccagacatgagaagaggatagccaacaaccttcgcacatcgccgataccgtcgtcacaaatctagcatttgacctgtttgtcaacacacctttgcgggggacgaatcgctgatagatccagcccagcaactcgcgattgtcttgctggggagcgatcaactcggatctcgctacgatagaccacacggagcagtgcacgtccaaacggcgagacgtaacaggcgacgagattgagaagtagcgttccgacaagtcaccgatcagctcgagcagcgatatatcgtagaggatgaccggttcgccccatcaaagggaccaacccgaccatggccatgacgagcatcgccatgccgatacgaccgaacaccacatggacgacgccggtgatgacgagtaccgaacggtggaagatgccctgcacgagatggaacgacctcatggagaggaacacatgagcctggccgaggccgaggcggtcaggggcgatggggatggaccggacgagtcgagacagcacgatgaggatcacgatcatggattagtgagtctgagcaatcgggctcctcgtacacaaggggagtctgtccggacgtccactgatatgtgatcacccacgttctcgtacatctcgttggcagacgcatgataggctacacatcctcgcagaacagactgtggattcttcacagggacctcccccttccatggccgagcagctcgaccgtcaacaccttcaacacgccggcgacctcctctcctttgcctcgctcggtgcgggtccatctggtgatgccgacggattcggtcgtatcttcgccgaccaggctcacgagcagaccgccgagatgggggaccaaccgggaatgcacgatgatgggggtgattatcaggtcgacctcaacactgaaggctaccacggacagggcggggacgagtcgggcatgtttgagcagggcaatgatggtcaagacgcaggcgacgggatgaacctgggggagttgggtcaggatcagattcaatcgaacccgagaaagaggaaacgtcgatcgccgaaaccgttgaaccagaatgagattgatcagaaaaaggccgcgcacgtgagtctttcctgatgacaatcacaaaggaaccggcggaggagcggcgctgacgatcctcatgaccgctccgtatcgctgcagaaagagattgaacggagacgacggcacaacatcgccgcaggagtggaagccatcgctggaatcctgcccaacggagacaaggaaaagtacaagggacagatcctcttccgcgccgtggaatacatgcaacaacttcagcgcgataccacacgagttcccgagctcgagacgaggcagactcatctggaagaagaactcgccagggccacgtccaacatgcccgggtttcaaggcgcgcggatcgaagagctcgaaaggcagaatcaggcattgaggacggagatggaggaccaggagcgcaagtgggcgcaggaaaaggcagagctcgaggaagaggtgattcgtctcagggtgagtcggacgatcagtctaccttgattcggtcgccatgcgctgaactgtgagcctccccgttcgatttcctctcttcaaggggcaagagcgcggctcttcagtcgacaagctatctcaaacggaggaataccatcggaactggcgcaacgaagagagtcgggcgaataatctcgccgccgaggtcgaaaggctaaagggcgaggccaggtcgagatgagggttcgacgcgggtgtttttttcgggcgatcgatggctcggactgtacagatcttttttggatttctgaagggtgtggtgtatatgggtcttgactgttacggcagatgaccggttgttgtaaccttggcgagcagaatcgagtgttcaagtgtagtttgatctagatgaatgatgtcgcgtccccaaccccagtccgcccgtaacctccacccacaatccactttcggtctatcgacctttgtcaagtcaatctgacaatatctagtcgacttgaatcaccattcaaccaggctgtcattcaaacatccagtatctggcagtgacaaccgtctggcaagcttatagataggatgacaagatctcgtgagttaccatttctataagcgtctgatggtgagatctctcaggctaaatctgccgaggctgcatatcttctcagatgccaaatcgaacacgagcgggtcagtcgctgatcgtctctcttgtcgtctaatctgattcctgatcaacgaactttccatgcgatataccataacagtgctcattacacctaccatgaaagacggcagacggagtacggctcaaagactcaacggataggagccgattcaatgaagaagctggattcgtgctgcctctgccttggacaggcacaaaactcggtagcttgctccaagggacatctctattgcaaggaatgcatcttgagtagtcgtgagtctacctcttgctcagggggctctggccgacacgtcccgactgaccactcgccatcatagtactctcgcaaaaggctcagatcaagaaccatcaagagtcgttgactcagtatgcattgtcagaggagcaggaccgacaacgagccaaggcagaagcgagggcaagggtgttaaaggatttcgaacgaggtctcggattggggacgcctgggtcggggtcgaccagcgcggtaaagagggacgacaaggtggagatcaagtccggacaggacgctgcagatctagggaggggaacgaagcgaaagtttgaattcgatcagagtgctgtcgagagactggcacaggaggccgaggatgccgcgttggcagagatggaggcggagcaggcgagtcgcaggaactcgtcgaattggaagtcagggggatgtatgagctgacaaacaggtggtcttttcgtatcacaggccgaagctcgaagatcgaaactgccatcgttctggttaccgaccctggctcctgaagccaagatcggcccattaaaagatgtcaagctgcagacgctgtgtaacgtcggccaaagtcaccctctcgcgtgagtttgcacagaccctttattcgacgttgagtggcattcggactccgtacacgaaagctgatcctgtcccaaaattcaacagcatgaaaggtcttctccctgtcatcttcacctaccccaacggcagcaagtccgacaccaactctgcaaccaaggacaggcccatctgcccgtcgtgttcgcgcgaattgacaaacgcgactcgatgcgtgctcctcacgtcgaaatctccagcaggtgctgaacctccaaagaagaagaagaagaatggagacgatagcaaatcaaaggaggagctctgctgtggacatgtcgtgtgcgggacatgcgctgatacggtcgtcaaacctggcaaacaatgcgtcgtgtgtgaagcgtcgatacgaccagataaggacatgatcgatatcgacaaagaaggtgagctgacgatatctggtatcccgggccggggcctcgctcgagaatctcgcccgacatctcggccaggccccgtttgcagagatcgccaagtcgagcccgattgtacaccatgctgaacaacttcgtgtcgggctacaggtacgggattcgctgcggctggtggagcagaggcccgcaaagtcggagttgcttttatctagcgtcctatctgggcaggatctctcgcaatgccgttccgcaggcggaatcatgtacctaccaacgatgtaccatgcgatcaccttgctacggagacagtagccaagatcatgagcttgtagcgcgaaccggaccagcacattgtcgatcagcctccttccgcagaaaggccccgataagatcataaatttcccgcggcgacaacgacgtcgccttcggaaattcctcgcttcgcatcgccaaggtcaaacgcgatatgcgaatgcgcttggcgaggatcagttaccgagagcgcgccaaaccctagacgtgcgctcggtgatggcgttgatcccctgtcttcgctcgtcttgttcccgaggtgacccacatgatacacctggtcggctcctagatagcacgcaagtcgtccttgggatgtcgactttgggtctttctggacggccgagctgatcgcaacggcaatctgtctcatgacgtgagtatatatgcctggatggtggtgaggagcggcatgtaccgagccctttatgtgaagcctggcaatacatcagatctggaccagcttcaccatgtctaccaacgctcatcctatccttgatttcgagtcggctccggtacgccctgaagggctgccgggccgcgcccatgatatttcagaaaaggaggcgccagcctatggatacgaaaaggacgagaagagcgagctcgccttgactcgacaagctactatcaccccagtcgagagtcttgatgatgatgactacgaaggcaagcctaccgaggaagagatgttgacacttcgaaaggtgccggggacaatgccttggaccgcagtcgctatggtaagcgtccgatcctatccctcttccaagtcgcttatactcaggtcttcatctgtacagtgtctgatcgagctctctgaaaggtaagccactgcttagagtctgccagggaaagcgtgtccttcgaagctgacctgcaacgctgtgcaaatcaaagagcttcgtactatgggtcagtcgtcattttagcgcgaagtgagatatcacgccatcacgtcacttatagctagacccctggcctctcacagctgtgtgcaactcttcaacaacttcgtcagagctccgctccctgcgggaggtcctggcaccggcgcggtccccaaaggtcctgccggagaaaacctcactgcaggagccctcggtctcggttcccaaattgccaccgcggttacgcagagctttacgttcttggcgtatgtattccccatttttggagggattgtttcggatgtctggtggggtcgtttcaagacgctctgcgtcggtaccggcgttggcgcttttgcacatgtattgttggtcgtgccggcaattccctctgtcattgcatcagggaacgcacttggtaggtcgggcgtgtgacacatatcattgatggcttggagctgatgttccttgcaacatagctcctttcctgatctccatctacatcttgagcggggctgccggttttatcaaggtattattatgacactctgtgtctgctgccgtatatccactgatgtatacggtcttgccagcctacgctcgctcctatgctctgtgatcaatctccggtcaagcgcagcacgatcaaggtgctgaagagtggtgagagggtaagtgggcttgaccttgactcgcatctaatcctggataatgataacctgaattatatatccaggtcatcctgtctcctcaagttactgtgcagaggtgaatggagatcggtccctgccacctgcaacatgaagctgacctgcaacccctaccaggtatctgctcgtattctactgggccatcaacgtcggagctttcttcggtctcgccaccagttacgcagcggtaggtcttgcagggaatcgccaccaagcctgcgcgtcagaaaagctgattgacggagatcaaacagtacaacgtcgggttttggcgcaagtccacctcatcaccgaaaaccttggatctcgcgctaacgatctcttttcataccacagtcgcgttccttaccccgggtatcttctatatgctcatgcctctcgtactctgggtctgctacaagaggctggtacggttcgcgcctcagggatcggttgttctcgaggcctccaaggcttgccgctccttgttcaaggatggcaatggtgccaacgtcttcaagaggggagatgctttctgggagaatgcccgacccagcgccatcgctagtcgaggcggagacgtttccgggatcacctgggacgacaagttcatcgatgatttgcaacgaactatggccgcttgcaaagtcttttgtgagtcgatggaagaaaagacccgctcatttcgcgtactaaggccgtatggttgcatctcggatagtgctgtcagtctggtctaactctcattactggtgggctctcagctgatgattcccggtctatagcattcccatcttcaacctcgccaacagcggcctcggtaactctgtcaacgcaatgagctccgccatgaccgtaaggcgccccgtaccatatactcgttggccggtcgcttaaggatcaatttcttcctcgtccggtatagctcggaggcgtcccgaacgatctcatccagaactggaacgctcttacgattgtttgctgcgctcctcttatcaactatggcctataccctgcgttctccaagatgggctatcctatctcgcccatgtggaggatggctatcgtgaggcgttacggttcaaatgtgatacagactcatttacgctaaagcctttgcgtatgttcagggattcacactcggaggcctgaacatgatttacgggggggtgttgcagacccgagtctgtgagtttgccgtgggcgagatgacgagagcatttcactcatgccgaattttgcctccacagatgcgacttctccttgtggcaaatatgctacttgtaggtcgcgcttgtccaactatgtggatgacagaacgactaatgacgtttccatgtgcagccgaatgtgccctcggtgtatcccctatctcgctttgggtaagtatcaccttctccgtcccggttctctgcggagcaacgattgaccaccatgcatctacagctccaagtccccctcttctcgctacctgcattgggcgagatatttgtcaacgttacctcctacgaattggcctatacccgcgctcctcctaggatgaagggacttgtctacgctttctgcttgttcaccaccgccatttcgtcggccattggacttgcatgtagtgcagccgtcagtgagtaccagcaccatatgtcccgatgacgccgattcaaccgctgaatgcctttccagccgatccttatctcgtcgaaccctactgggtattggctgctctcagcttggcctgtggtaagccacatcagccgagggaaggaagaaagacgaaaagctgatctgacatgtgtgatgctagccgtctctttcccactcttctttaagggtctggacaaagaggtcaatttcttcgacccttctcttacatccatcaagcaggacaaagctgaaatcgatgcggagactagcgaaaagcgttaaaagttggcagaccgcaacgagcattctcaatggtgaaccattgctgtaaaaagaaatctacggaacgaaaattgaagataaaatgaataatacgaaaagacacttttcgaatcgaggatgtgggttgaagaagagatcccaaagtgtctctgagggctaccctgatcggcttgacggcctttttaacatccagtaacgttcgttctatcattttggttcacatattggctacattgagaagggcccccctgtccatcacccgatctgtctgatccgaaatcaactcctctcaagctcaggcaaagtattgacccaggttggcgtggatgatgtttccggtgatgatgttcgagcactcgttcgacgcgaggaagacctgtaaggcgcgaacagattcagcattgagcacccctccttgacaagaataacgctccgaactcacaaagctaggagcctgaatggtcgagggagacgcagaatcggtcggggagagattagccacgccattctaactcacgtcgtagaacgctgagcactcacaatttcgctgggctgtccagcgcgtccacgcagaggcactccagcgacggtccagtcctccatctcctcggcctcacgcgaagcgggctggagcggggtgtagatcggcccaggggcgacggcgttgaccctgatccccttgggagcgagctgcccagcgagagctcgggtaaaggagacgatggctcccttggtggaagaatagtcgaccatggcgggtgatcctgtatcacgtcgagatcaagccgagtcagcgggggtcgggagctccacgtcgaccgttcttctccgttctgctcacccttgaaagcggtgacggaggcgtcgttgacgatgctcgctccggccttcatgtgaggcacacagaacttggccatggcgatcatctgaacgatgttgctatggaaggtcgacctgacattgtcaagctgaggggaatatcgacaatgtgttactggtcagctccggttcgatcaatggcgaagctcacgaatgactcacgtcgatgtcgacaatgtctttgcatttgatctgcttggaagcctgcaaaacgcgtcggagcttcattcagcctgccgaattttctttacagctgaatgccagacccgcctcgagactcacgttgttgatcaagatctccaaatgaccgtacttttccatgtgctttttgacgacagcttcacagttggcatcctgcatcaagtccccggggacacaaagacactgcccgccctcggattcgatctgcttcttaacctcttgcgcgctgaatttcaggaagcacgtatctaatatcagcgtgtggagcaaaacaaggcgtaaatacgcctaggaaaatacgcactcgtcctcctcctcggcgaggtaagcgatggtgaccacggctccttccctgtggaaagccaaggcggtcgctcgcccaatcccagagtctgcaccggtcaagatggcagcctttccctggagcttgttgctacccttgtactatcgagaagcgggatgtcaattaagcttcaaatcgtctgtgatagaccgcagagtgaacaggtcgatgcggagttgcttacgtcatacagggtgggctcgccctcgttggtccagaccctaattaaaggaacacgctcgacatcaatcagccattcaagatcacatagacacccacctcatctcgggatgagcttcgtactcactcgagctcggtgtgcttggcgattggggtcatgtccttttcgcttccgggcaacgaagtcttttgcttcttgatgttcaagagctcctacgtgttcgggaccacgtatcgaaacgtcaaccagaagcggaagttgctttttaaatgagctcaaattcgacatctcattggaaatcgattcgcggcttacagggaaagcggtcttgatctgtttcttgtcttcttcgctcatcttgttgaatgtgtttgctgttatggagatcgggcgcaaaaggtgttgatgtcgtcgtgtgaatgttcttgtcgcttgtctagcaatgaacatgtaacgtagagagtctctttgtgaaagttagagaagaagaaagaatggagtgaccagtgcgagcgtcgatgacgatgaattccaacttattatataccccgcaacctttctaacttttggatgattccagcggaatgcgcccaagcgaaagtcaaatctgacgtcagcgacgggaaaagaggcgcacgtaggtgggggctggctgggtaagcaggcacggtttcatcccttcacaacccccttttcaacgtcatccaggttgactaccaggccatgcatccattcgtatcaacaattaactagtaaaatcaacaagtaataacaagcgggtcatttcagatttcgtgcaacagaagcgcggggccgtttctctacatgcttcttcgaggaaaagaacaacaagatcacgcggacagaaagggggtttaaagtgacgtgggctacaggcgggaacaagaacgaagggaagaggttcgcgaaagaggtcgaaggaggacgtgaaaccgtctagacgtcgaagacgtcactcctccatccctcacttcggctctccctcctctcctgttgcctggcggcacgagacatgtcgctggcctcggccctggccgtgttcttggccttgtcggcatccttcttgacccggctctgagcgctaccggcgatacccttgccttggtcgaccttgtttcggaggtgggctcgcttcgggtttcggacacgtgcggcgggcttgttagggaagagctgaaggatggacggacgagacgtggatgtggatgtggtcagtttccactgatcgagatatggactccgatacccctcaaactcacctcttcgtcgacaccgacgtgcaagacgtactcgcccctcttgccgtacttgacgagccccttggaagtaggcctgacgctgccggccttggtcatcgaaggaccggatccaaagatcgaggtggagaagacggccttgaggtagttggcgggcgagggtcgagcgttggtggcggcgatggttcgctgttgcagaccgtacaactcaaagtcggcctgacgcaacgactcggcgatctggagctccagagcctgggtcatttgttgctacaatggagtagacaggtcgaatgagatcagctccttgtgcagtcaaagacgttggcatggatgatcgctcatcactcaccagcaaaatggccctgacgggagccttggccaaccaagtggccatccagtggtcgttgttcctgatctggtagtcgaatccgatgatcgaaaccttgacgctcttgaccttgaagaaggtctccctggcatcctcgtcggcgttctcgagagtgacgtcgaacgagatacccttgggtccgaactggacgtccaacagacccgagtcctcaaaggtgacccaaccggactgatcacgttagacgaggaaactagatgagtttgtcgcacgatgcaatacgcagcaaaggtcctcgaacgtaccttcttgtggaaccagtaagcaatgtcggaagcctggacgtgcaatcccttgactcggagtcggaccgagctgtcataatccgaggcgtctgtgcaaagttgtcgtcaatcagcaactgctagtacggtcgaatgaagcgctctagtgcaagcgacccaactcacatgtagcgtatccctggacgaattcgaaatcgttgtgcgcgacaaacttgatcgagtcggggatgaacgaggcagactcgagggtcaagtcatcgatgacgaggtcgacgtctggtggggaaaaaaaaggggggaagcgggagatcatcagctcgggatccggacgactagacaggcgatccaggtcggactcaccggcactcttgaactcaatcctgggcacgggaatctccttgacgaggctgaccagacggggcaagatgacgttgacggcgtcccggtacaagcctcgtccttcgctcttcaagctgctccaaccgacctgaccggcctcgacgctgtcctcgccaaacgtctcgatggcgtcgacgagttctcctgacgtcttgtcgtgcgagagggcgttgaagaaggactcgatctctttcctcagcttgtcggcatccgacttccaggtcgggttgtccttgatcaaggtctgaccgtcgtcgtacaacgaggacgccttgcggtaggctcgctgcgaagtgacgtctacagggtcggaagcgacaagcacatggtcagccgattgtaatttgattgccacgcgcattcgatcgtgaacatggcaggtgactcacacttggggtcgttcatgcatcggtccaagaacccttcgatggcctcaaagtatgcggtcaacttggggtctcccctgatatcatcggcagccttttgtccggcctggacgaccgggtccaagctcttcccagcgagacgctcgacaaacgtcttcaagtcgtttccggcctgctgaaccctatcctcgtcgacgctggcgtccgacttgtccttgacctcttcgacggcttcttgagccttggacatgtactttttagcaatgtggatgagcgtgtccatggattccttgtattccggggtgttctgagagtgcgagatcatctccttcattcggttgatcagggcgtccttggcctcgtcagcggcgggaagtttctcatccaggtactaccgagcagatcatcgcgagaagcgtcagtaacgggggcgcggacgtcctggtagaaatcgacacccggaactcacgtccttcaaggcgactcccttgtcaaacgcctcctccttggcctgagcctggtacaacccactgatggtgtgcttggcgtgaaccttgcccttgtccttgatcttgtcgtaatccaacccttgctccctctcctgctctgaaggtcgagtggccttggcggcctcgctggcagactcggcggtcatctcggcagcgtcggcgaggatgtctcgggagaggaggatgatgtcggatccgagcttgcggaacgagggcgaggtgatcatgacctgggcgagactaccgaatttacggatcaaggtcaacgagtcttgagcgacctcggcctggccagagagggtgaccgagggcccgcctgtagatgagacgaaatggaagaggtgaccaagtcaagatggtcagtatcgaggacaagaaacagctacccgtccaggcgtagactcaccgacttcgacgtcgacgtcgatctgagaagcgttgtagagcaagttttgcaacaagtcgtccccgttcttctcctcgccccatttcttcaagcacctgaggacgttcttcaagtcctcggaaagcctggtcccttgctcacccaacctggcggttcggctgttggggccacctcccgatttgaggacgtcgctggagaggacgacatcgatcatgcgcgagacctggtcttgcgaagggaacttgccggccttcaaggcgccgatggattgagagacctgaatgcgttggttcttggaagggagtttggattgaacttgggattgcgaggggagttgctgtcgcaccgaggtgggaaggagaggttcggtctcggacatgatggggatgggaatgtgtgattgaggtttgggtaggtagtagtccggggtggtgatcgagaaagtctgttggtgatcggtgagaaagagtttgtgtgtttgattggatgtgtggttggtcggtcgagagttgtgtgactgcgactatatctcttataacaaaaggaggaaggaatggcgacgacgacgacgacgaggcgaggtagaatgctagtgtgtggtagcagagagtgtggtagctggtggtcaaagagtgatagtgccgcatgccatgggccatgggccatgacgatgatgatgatgcgacgaattgattcaaaacacgaaaatgacgtcacatcacgcccacacacggggcaatgcccaccgcgtcacgtcgtcatcgctcgctcatcaccgcccatcaccactgggcctgctttcctcgggcccggtcatgacggtcatgaccgaacaaacgatcaccgcccggacacaaagtaaacaacagcaaccagtcccccctacgccgtttcatcgcgcaaccaaacccctctcgccccgctcaaacggtgatcccaggtcgacctccaaccgatcgatcgtatccatcgacccgtacctcgcatgcgagtctccctccttgatcagcctctttcgattagtactcatggcgatgagctccttttcgggggtcgtcggaaacatcatcgtcgagccagacgtcgtcgagctcgggaaactgggcggagaacccatctgcccggacgatccatgtcgtaggagttcattctcccgttccagtctgtgcccccgaggctcattctcgatcagcccctgctttgcaaatttacagcaaagtcccgtcaggcgggtgcggttctcacctagcgatccttcccacagaatccaagtacctcccttgcagacccatcagttcagcctccaccctcttcttcccctcgcgctcgagcctcaacgactctttcaaatgggtcacttgagcggactcctcgtctctctcaagccttctcttctcgtcatcgtccccctcgcattcaagatcctgatccttcccctgaacctcgtacccaaaactccccgacctgccacgctcgatcccgagatccacaccgaacaccgactcggcagccggagccgaacgtggataaacgacctggaccaacctcggctgtcggtcgttcatttccaccctcaacgtcctgcgcgagcgtttttccgccagcgggtcgaccgagctcgataggggttccggccgcacagacgcacggggccggctgtaggaataactcaatcgggggagatctgatggcgggagtctcccccgtatgaggctgccgggtgaactctcctttttcgggtcgatgttaccatactcgtgtacactacccgttccagccggaaccttcgcgttcgaatcaggtcggttgcccagcgcttcgactttggcgggcgctcgcggtaacggtcctctcggaggagttctgtttgtatccaacagacccacttcctctcctcttcctctcgcaatcctcttgggggaccgtatcatagtcgaaacctcctcgtagacctgtgtcggactgatcccgcgcgggattccgaccgataccgctcgcccggtccctttgaaatcgacggtcggccaggttggtttcccgataggaccattcagagcgtcttcgaaagctttcattacgtaaccttgatcctccagtacgccccgagtaggagagacgtaagtatcctcttcaggtacatcacaagggttgtcaagacaggaagacagtgaatcctgagaataccgactctcgaccaggttcatcgtatcagtcggaacttgcatgaggtttccaattggagaattctccggcacgttgactgcacatcccagggatccttgatgagttcgaagggggatcgagggacctagagagacggacatatcgggttggtgactgaggatcggctcggaacgtttcttttgcaatctcaggggacgaatagttggtctgtcaggcctggaagagtcgaggtagtccgcagcactccaagattgagaccgaggtcggtgggacttgctgttccctgtgtctgtaactgggaaaacactggcggcgtgtggttcttcggattggttggcgagcatcctcgctggaatgactggtgggatcgtcgggacaagtgtgaccgttttctcgatacctctctcgatcggaagatcgaccgggacctcgatcattcctaaaactgcagcctttctctcccaagccgccgtaccgcttccgctcctgaatatcctggtcgtcatcagaccgatcgcacggttgtctccatagccacgggcaatattcttcacgttccaaacattggcatccgatcgccgagggggcgaggcaagtgattcgatcgagtcggatgctgcaatctccttgtctgtcttgtacgacgatggtccatatgccttgtgcaaggtgatcggcgagaacagacgggcttgagggatctcttccggggcagaattaccggatcggtggaagcgtaggcggggagacggcgaagacgactgcgcaccaatgtgaggcttgcccaggggaataggtggcgaggcgctcctgcgttcgaaatatcatcaaatgtattcgagaaggcgagacaccaacccgtcaccacttactcttgacgaatttctccgtgaacgaaactcttcttccttcgaacgtctatagacgcctctcttcctgtcgtattgtctaacggaccctcgacacgaagatctgccttgctttctttgcgtcgcatcctcccttcttcgccttctccgatgtgcaacaacccaaatagactcccgcgcaggcctttcatcaaggatggctgctttcgaggctgtcttccggtcaccgttccttcgggacgttcctcgatcagatcgctttgaaataatgactcttgctgctgaatgaccgtggcgcctgtagaagccgtgaaagaccgtggcaaggtgaacgcactggagaagctcggtcgagacttccgaggagtagcatttcgacctgaggtcggaggggtagagctgcgatattcgagttcgcctgatcgagcagagtgaatgtcgcttgcactgaaaccgcgggaaaaggtacaaggacgggatagcgaaggcggggaaagacgctttccaggccgatccgtcgcggtgtcgggacgggaatccatacgtggaacgaggccggactcaacctttgccgtcgctggccaagaagatgttcccgaaatatcattgattgaacgatcgtatcgcgatccgcgagtgggggtttgactggacgagacgttggtgacattcggtgcagcacgagacagcactgtggaactgacaagtaatggagctgaattagcccgggtcatgatgggccggccgaccgggtccgcgaaatcgctgatcatgtcaaattccggcgtagtcgagcgaatccaggccttgactttgcgttcgttatgggctttgcgtttcgtttcgcgaaaggacggcttggccgggtcaagagtaacatcggccagtctcgaggcctgcaaggcgattctaccgccgtcttgatcttctgctctctgactcctcgtggtgacgtttctgtcccgattgtctgggatgtgatcgtcgacagatgacatgggtactgatggaggccgcggagctggatcggcgatacgagtggtagaatttgcactcactgtcagcattggaacccctccctagaaaatcggttaacttactcggagacaagctcgtagttgagagggctaccacagatcctatgatgccgggtccgggtgagtaggatcacgaccggttgagcacctgtcggttagccagggctgagccacagcgttcgagctaccccgaagttgctcttctcgcaaagagccccgaaaagctgacagagctacacgtaaaggtgagctcagcgtgtcagcagcttcaaatgccaatcaaagctgaacgaatacggtcgtgatgtaaaaaagtgcatatcacagcgccccgacgtgcaactagttcggaacgccaaagaaccctcgtcatttcggtcatgtccgatgcccgaagccgggaacttattagaaaatccggctcgccctacgaagggcacgaagagcaaaaagaaatttgggcacttccgcgactcgaacgcgggcatcgtccataaactagatcgcattgcgaccgggattaactcccgaaggacgtatcctacctctagatcaaagcgccgtcgttgttttcaaaatttacataagtatgtatccccaacaagctgccgcatcatcaagcgctcactggttgagtcccttcagcgcacctgttccgttctgacagctcatttcaacttacgcatcatgtaacagatatattaccaagctattgttcactgaggtcaatcccgccttgccaaacgctagagtgtcgagccctcatcaggtcagcttaccatattgactccgctgtatcccgtttgtcagattgcgtgtaatagcaaagccgtctaacttccgtgccagcgctcgatcaatcccgaatcgtgacaggaagattgaaagcagtccatgatatcttctcaagttgcaaacatattccgtggcttctgcatgaaagcctccaagtccagggtgatgttcggtctgactgctccccggatctaagcgtcgctccatgagcacggcgcgttctcctattgatcctactctatccgtctcatctgtccctactattcgttaggcctatgtttgggttcacgattgtcgtaccatatccgagttgtacattaaggtatctcagaaaaagcacatctagtccagtgaaatggtccgctctttacgtcagggtatggagacccgcaggtcaatgcatcgggcccgagtgaagccacggctatgctacgacaacacttctactactacatctggagctggaaaggatccgacaccaagtcgtaagcacccaaaaacaccgcgcctcctagagatatccacatcgttctcggaaccacaccggcgaaaagagccttgacaccctcttgcgatgttatctgcgccagccgggtcgggatcgacaagaccgatgcggctcgcctggaagccccatctgcctttgtggcctatcacatagaattggatgaaatcagtgccagggctagtcaacgttgaccgaggtgcggctaggcatacctttgcttcaagcatggccctcgtcttgacgacgtcgagtggagttgtcaaagcggcggcgatacctccagcgatcattccacacactgcggcttcgtgcgcaaggggcttccttttgtcgggaaggtaatcctcggaaagtctcgtcttcaaggattcgtagagcgggaattgaatagctgtaaagggtatctgttgcggataagacacaccgcagatgtaagctcgaccctagaagaggaaacgattgagacaccaacctccctagccaaggttattccgaatcctcggtagaagcctcgcagcccctcaagcttccatacgttggtcgcactcgagaggctggacgccccggcaccgtaagccgaggtttgtgtcctagacttgacgatctctgtgggtacgcggatcaaacatgccatctatgcgggtagtaacaacaatcagcttgccattgtagcggcggatcttgccaggaatctcacaaattcccctcctgaggctgcgaacatgtgagttaaggctggactgttgctgaatgtcgccgactgtttcggcaagttcactttcaaattctcgtacgcggtgaagaacgcagcagctggaaggcgggcctcagctccacgaactagtagacagatccgacccagactcaccaccaggtgcactgcctacaccaacgctgccaacacctttgtagatccccttgaaccctcccgctttgacaaatccttgctgagattgaagccgtgtcttgatggtgtcgattggatagaacatcaggtcaacagataaaccagctaccgcaccagcctgtagcaacgtataaacatgtgagacagcagcaaagcaagtcattctacacgattcgtcttaccactagagcccggacgaaagacggcggggtgcggagcgaaccagcagtgtctgcttcttccaacacgctcgaagcgacaataaccgggccatctgatcttccaacagccgcagaagttataggcaaagcagctcccagctgcacaaagccttccgctcgaggcggagacatgtccgactgggcctgaggaggctctgagagtgtaagatcgttcacaccttgtggcaactccgcaggctgatcctgattggtattcaggggttccggtgtcgtagagcgagagacgactggttcggccaatgccgagtcaggtgagggagcggcagacctgcgaccacgttggggagtcgacatgacgacgtcggtatcagtctctgccgtttccggtcgaagggacgatgtcggcgtttcaggcggattcgccgtggtttcttgctgagctgacattccgaggctcgatggcacagcgtcactccgctgaaggtcaaccaggtttcctctcgagtctgacgccgtaatttcgacagggctctgcgacgcgggcttatctgaagcatgtaaagaagcggtgctctcaagagcttctacgggatcgagcgaactagaaggttcaactttcacatcatccaacatgccaggtacttgtttccttgatgtataagacgctgccctcggtctttgcgaggaaagcgtgttcagcgagaccgcggcgttcatcgtcgggctagcttccgtagattggatctggcccaattcgttgaccagaataggctgcagacccgatgatgccccctcttcggtgcccgagggtgaaccagcgccggaaggaggacttctggttttcgcagaagatcccatagaaagcataccgaacaagctggtacgcctatatgtcttagctcgcttcgagcttgttcccgagactgtcgagggggtttgagccgcgagggaattgaaacttggggacgcaggcagaggtcttttctcggctgctggcggcgcttgtggagctggaggcggggacaaatttcttcttgtcccgctgaccacaatccactcgccagcgagtcgagaggtttgacgagctgtttcgtccactttcagcaccaataataccggccaatttgcataaagcttcatgtccgcatcgatttctgcgtccctgaggaatgaaaagaaagccggaggaatgtcccttgcttgcagctgatcgatggtgaagacaccgtacacatcgcgggcttgtcgtctagtattcttgctgtcgctccgaggggttggggggctgagaggtccaatcgtgttctgcctgctgagcgactggtaggcgtgctcgcgtgacccactaaccatctcccctggccttttttcctcgaaggcgtcgcctaattgcagaccgattggcttggtttcatcgctgaaaccactcttggtgaaggtcttccaatcggcttcttcgccatgaatggccttagacgcggtcagccccgtaatgggtcgcgacatattgtgctccgagtggaatatcgagctcgagctggaggaaggtttggctggttccgatgaaggtaaccagctattcgagcgagatactccgagaggcgtactgagatcggagaagaaggaagaggtagaggctttccggaaaggtcggtacaccgtccttgtttcgaatggagaacttgggctcagcggaagtggtacgacagccgggtcgaagtccgtgagtgtttcgccgttggcagtagaggaccggctgagaaggccgaataaagagttgccgggcgcggccgactcatcatctcgtaagtcctgccagccggccaaggtcactggcgaaccgtacttggcctccctaatcaatccgactccaagctcttcctgcgatagactcgttggagggcgttgatcgtgttccaaatcgtttctgacctggaggaacaaaatcgtctgatgcggcgctggcaccctttcgaaagaatccccacgataatcgtcgaccaggttgcgtatcagcagaggcaattgactacgcgatgaattggcagattggcctctgtgaataatagccagtcagtatagctagctcaatccaagtgtgacactgccgttcccacctgatccaacacctgaacaaatgtcccatagccttggccgcagcctcccatcgcgattccagcacatccaggcgatcgtcttctctgtctcctttcgctaccgaggccggaagctgtaaggcgaacaaccaccagctcaaaactccgcacatgtagtcgatactggcgctgttgtccgcttcgtttgcactgatgagagcgactcgatcaaagagctcctcgagataccggcagtatgaagtcgggacatgagatggcaaaatggtatgccaagcacttggtgggtagttttctgtcgtctcctgctccgagaacctttggtaccagcctggtaatccattctccgagcgcgactccgactctgggcaattcacccgcttgacaacccatttcaagaactgcaccaagacttgcggatttcgaatgtagcctgagtagctgctatagtcggcagaccaatcgtgatcgtctgtcacgaatgcaggtggagggaaataattagagagcgaggggtaatccgtaagacacgacggatccgtcgatacggcaaagatggccgccagacgataaaattcgtgtcgagtagattcgaagccgtcgtatgacacgtcgaacaggccagtactcttcaagcctgaagagacctagtttcagccaatttttgacaggtaacgaatgaaatcaaatccatgcgatactcaccgatcgctaaaagatcccctcccgagatcttccaagcctgagcagctacttcaggcgaaaagcgtcgctgatcgaccgccttcttttccgaagccagcaaatccttcgcatctcctagttcgggcagatgctcgccatgtgatataggcgctggcgggtcgagaatagtccgctcgccaggaattttgaagtctaggtcgatcctcggagcggtcgtaggttgaggtacatcttcgacctcggcaactgctgcaaagctagaccgactacgaggcatgccaacagtatgttcacgcttcccattttgtgaggtcgagctgtttccagccccggttggacgagcgtttggcttcgaggttgttgtagaggccgaaccgtcctttgatcgtttcctatacggcttgaacctggctaagaatttctccatgattgctaccgaatggatgacggagaccggagccggacgtatgagtataaactagagccaaatgtagttaatgtacgggatcgtgaggatcccaaatctcatcttgacaatcaagactggtatgatcatgatttcaggatgatgaatgtgctctaggttcggatcgggtacatcctcctccccatcgcacggaagcaaattaaaatgtccggcccggtaaagggtatatgcccttgaactcaaggatggagactatctcgaagtcaagtaattatacgagtaatggctacaaggtacaagtcgcaaatcgtgtacgtgctcatctatgagggtgctcatcaacccaggtctactgttgtttctgatcgtcttccacctcttctgggtagcgagaacgagtctgattgatcgtgtctaaatcgcagcgtttattgttagtatagacttgaaagcattcgcccaagcctcgaaatagcttacctcggagagacaggaagacgtcttccactgccgtgctgctgaaatgaaagtcgcaatgctagacatgcagcagaatctcgcgtcaaaatattgtcgaacaggctgtcaatatggagttgtagctcacctcgagctcgtcgagcttttccacccgaatcgggtgaacattctccttctgctcgaggcgttccaataacggctcggtcaagacgagatagtccttccctccgtaatagatactgaggggcgggaaccgctcgtcgaaccaacgatcgagggtatcgtccagcaagcatttccgctctgcgaaaccgcccttgccacaccaccaaaagacactggcagagctgacaggggtgggcgtgaatcggaacatcttgactttccgccgaggcagccaatgagtgtctgtccaggaaaagaggaaagcaaacatggtactgcgcaggtcatgccagggtcagctttgtcgacatcctccttgaagcgttcgtgtgacttactatcccaacgtcgcaaagaccttggctgggatgagattcgaatccgcagcgtaccgcatcaacgggatgaaatcgagcacgccgaatagcttcttccataggggccattcgatcttgcccagctgagcgaatgggaatccttgcgtaagaggtcccgcatacaccgcgggggccagagcgacgaagagcgacatcttcctgcccaggtccggacacattccgagcgagagcgagatgaaggccagtccgttgccttgcgagtgaccgatgaacgccagctttgaatagcccgtctgaccgaggacgtggtcgaccatggcagggagatcatacatagccaactccctgattgtccaatcccagaacctagggtcggatcgggaaaggtttcggtgacccatcccgaacacgcccctgccattcccgaggtagacctggtatccgccttgcttggcgagccagaatgccagtgatcgctcttccgaggtgatgaacgatcctgacgactggaagagcccgtgtaggatcaagacagggaacccgcctcggccgtctgcgtgcttcgtcgcgtccggatcgatgactctgtgcaccctgagctggtaaccgtcctcggtctcgaccgtctggtcttcaatgtccattccgatcgcccgcgcataatcccgcggattcctactcgtgtggtcgttccgtgtccagtacttttcgtcgtcccaagggaacgtttgtcgtttcgacttgcctttcaaccagcgagggatctgggtataactctcgacgctgacagcccagatgactactcccgagagaaaaacggtggatatgatgagcgaggcggtctgcatcatgaagagtttgaccttgtctactgggccgagagggcgtggagaagccggcgaataggtcgacaacgaagggggtgggaacgtcggccgtaggagatgttgcgtaggcgaggcagatcgatcgataaagaccctgcgtaacaacgtgttgtccctccaacccgaggaaggagagggacttctcgatggaccccgcgaggaagaccaaccgaaggcgtttaacgccgtccctgtggctgctgctaccgtccgcccgaagtacccgtcttcattcgatgttctaaccgtatctccgtccgctcctccggtctcgtcgctcgctccgttggcgccttcaaaggtcaacagcggcacgttcgccccggaccccgagcccgaaccagaccctgatccgttcgtgacattggtcgaggatgtatagctcttcccgaccggtcggacctttctcccttgcacgagctcgaaatcgggcgtcatggcatcttccggtcgacgacgtaaggctctggcctgttttgtcgaagtcaatccgttgggcatatctagagattaaatcggcaatttcgacatcagatttactagctcgcctcggccgggtcacaggccagtcttactcactcagcgccgccctggcgggagcatccataagtcccaccagatccttttcagatcgattgatggcctctgcaggcaaaagcgtcatctctcctgccaacggtgctccaggctggatcttcatcgatttcgcatactcggccgggtcctgtgaccattgcctcgtcgtggccagcgggaatgggaccgaagggatctgcatggtcgactagtctttgaagttgtccctagaccaggtcgaaaaagctgcaagcttgccgagcagagtaagtagccaagatttggttggtgatcgctgaaattgcaggttgttattgatttcgatcttgttgttatcttgaatcctcgtcaacgtaatcgtcttttgctctactttaaatccgtgtcaaggccaatggcgtcaggagtatgcggcgtgaagtttcgctgtacgatccttgtaatgtgtatccacttgaccaggtttgaattgaaaaggaaggtcgatggcgatgggtcgttcagaattctgctcagctgctcagcaacctggggtccttaacccctctacgccggagtgagtcgagtgtgattccgtggttttgttggcgcgcgcggagtaactttgaccagaaggagggggcgatcgtcaatggatgcatagacatacagtaggccccgacgggactagcttgaatttgtgggtttcaaaattcgttctccattacccgatacggattagatatactacggtgcgctatgccacacttgttgtcgaaaatgttgaccaaagcaatcgaccttgtctcgatagctcggtagccagccgacgatcctcgatgtaatctagtttgcgtttgcatccgaaaccacatcgcgcccgtggccagctctcgatcgggcagagccctgttacctaccacgggtgacctgcctcagaaagtgtcaggggcacggtctcaggttcgagtggtataaatcatctttcgtcatctattccggttcgacaatcacaagttcagagactctcgataaggaaacgttcagaaggaccgcacgaaggcggtccttttcccaagacatatagttggagaaggatggtgatatggtaaaatgaaagttggttgcgtctcggtcgaattccgtgccccgcgatctatatggggaagaagtcgacctcgtcgtcgtcgtcgtaaaacagaaagagagaacaagcacactatctaaccaaagagcccgggcgtcgcgatgagaacgaccggactggttactggtcctcagacctggtccgagccgaagccgaacggatcgatctgcacgtctcaatgatcgttaacccctcagttcttgtcggcgctgacgtcgactcccgagtcggactgcgagccgtcgccggaaacagcagcgtaggcagcgacacccctggcgttcttgtagaacaagacgtcaccagtgtcctcgatgaactggaaaaggagcggcacaggacgtggtcagcgagttgcgctttacacagtcgtgtcgtcataatgcgactcaccttgcactgcctgtagttggtccagacggacttcaagaagttctcgtcggtgtagtggtagtactcgccgacgtagttcttgatggcctctgtggcgtcccaagcggcgtagtgggggatcttgctcgagatgtggtgggcgacgtgggtctcacagattccgtgcaagacgtgctttccgatggggccgaagaacttgcggtcgaaagtacaaagggcacctcgggcaaagttccactgcttggcagagtagtgggctatgaatgacgagacatgtcggtcagctcactgtcaaaagcagccttgtggcatccaatgcgactcacgcaacaaggggtcggtgtgctgggcaaaggtgatggcgaccaaccagtggttgacctggaggtaaggcaagatgtacaaaaccaagacctccttgaatcctcgctggctggcccagaatccgacgaccgaaaggacgatcaggagaccaatgtcagacatgacgatctgcgaccagtgctcgggcttgaagtagacggaagacggctggaagtctgtcaaggtgaaatgcgtcagccgggacatgtcgtgtcagagaaatgacaaggaactcacggttggtgaacttggggtacctcctctggccggaagcgttcctgatcaagtaagcgggccatccgaacaattgctggatgacgaggttgtagaggacgacaatgggagcgtcaccgatggcctccctcaactcttcctgacgttgctgcgagatactatcgagttgacggaagtcgggcactgtcagatgcggtttgcgtgacaaatgcgtggccaggggcaactcacgagacaccgtcgagctcgccctcctccttgatggcaggggcacccaactcgctcctggtcttgggaataaagacctcgtccctggtgacgtgtccggtggcagcgtggtgacgaccgtgcgagatcctccacgcgtggtaaggaacgagcaagatcgagtgcaagacccaaccgacggcgttgttgatctgcttgctcgaagagaaggcctggtgaccacactcgtgggcgatgatccagagaccggtaccgaagagacccatccagatcgagatcgaggtgtggataacggctcgggcgacctggtaggcggggttggggaggttcctggaggatcaagacaggccgagggttcagtaaaggtattcggaagggcgcgtggcaggctacaaatcgatactcacaaagaggcaaggaaggggtcagtcttgaaagacgcccaaaccaggcatccgatggcgataaagtcctgtacgatgtactgggagctcttgatcgcggacctctcgtagcagtgggctgggatggcgtccaacaactgcttgatggtgtaagtagggggaacgaactgcttgccctgggcgacggcagcggcctcttcggcttgttgcttgatgtcggccttttgcatcagggcttccttttgctgttggcccgtagtgggacgttgacggagagaagtcgacatggtgatgaagggtggtcgtgaagaaagtaacagaagtctagttgtatcaggggatgggtagggaaagtgatgcgagtggaaaggtaagaaaagaaggtctcttttctctcttggccgactctgtagttttaaagatgtcgttagctctgtactactctaggagttgtagtagaggttgacgagttgatgagaggtcctaacccctaacccctaaccccttggctccatttaagtgacataatacaacgaccgccattcgtcatcatcaccttcaccgccgccatctcgaacaccccctattgactcgctcaaaccccgccatctcttactcctttccacgataccgttccaaagtacgcatcatttaagcacgcccggttatcgagtccaaacgcgtacactcccagcatggttccgatgcaaaatgaattgtcctctcgactccgagtgagtgcccgagcggccaagtgaccgacccactcccatttctgtgtaacgctcgagtatgagacgtaaaagtcgtatccatgcggcattgcatcgatcttcacgtcgataggaccagggtgggttagtggaaagcagacctcctgtagtgggccacgaacatatacacgtcggcaagcagcctgaaccccaaacaacacgtcccgtccactcacattctcctcatccttgtccggattgctcgccctgaacaccaactgcttgccctcggcacggcgtccttcgcctatacctctgatcccgatcgatccgtatgcatatttggaccaccaaacgacggcacccgcttcttcccccgtcatcattggctcgaaatcaaccgacgattgccacacgccttgaatggcggtctgcttgcgaagcaacatggccaagcattcgtcgtccttgaacgcatacggtcctccgtggacggccagactaccaggccgcttgttggtgctccaatcgtcaacgagaggcgtccgtgtgtgataccatcctcggtcgagggctagaattcggtgtcgttatcaggattccgcttttgcatttgcgactcttcagccacgcccggcctaggacttacgcttgcccgcctcgaactcgatcacctcctcaaacgtctcgtccaacctcggcaatcccgctgacacgggcatattgatggtagccctttctctgtcattgacgactggccagtcgtttacccattcgaccggcgacaagaacgtctcccgcccgagctgcgactgcacttccaacgtcttgcctgccgcatcgacttgcggcctgactcctagatacaccgcccaccatcgaccatcgggaccttcgcacaagtccatatgtcccgtcatcctgatctcgatcgaatcgtcgttgaatatcatcgggttgatctgtggaggcgccgtcgtccatggaccaagtggaccctctttgcttcgatagatccactgttggtgcaggatctcggtgcctccgatggcgacgctcaagtaatagtagtcgcccttcttgaagatatggggaccttctgatacgccgttgccgacgcttgtgtagcagatgttcgtctccagggtaagatttcgaccagtctcgacgtcgatctcgcgggcaaagcaggctactggatacccagtctttttcgaaagcacctcggggtcgttggtgatgtcggctgtggccacgtagactttgccggtactatcgtcgaaaaagatctagaaaggggtcaagacgaaggtcaagcgatgagcaacgcgaaccttgtcgaacgtccacctctcactcgcatactgacatcctggtcgatggccgtgttgtccaggtagacgggatcctgaaacgaatcgggcgtagagatgtcgtcgctgtagacaaagaatcccctgggcccgactccattctgattcaacaaacgcagccgccgtatagtcagtgcatactcgatcgactgtcgcaagccatcacgggacttatcgcgggacttacgccaaatcccttgctcgcatccatgcgatgaactacacatgtaatgacatatacccgccccttgtgctccctgatcgttgccgcaaaaattcccgctcccgattcgcatgctcgcaagtcgagctgagaccgacgactcaaggcatgtccatggagctcccaatgtaccaagtctttactcctatagataggacatccgggaaagtattcgaaggacgaagtgacgacgtagaagtatccgcccacgtgaatcatgctaggatcgggattgaacccaggaatgatagggttacggtagcctaatcgagtcatagtgccggtcagattatcgaccgatctttcaggttgttacggtaatgctagggctgctgctgtggacgaataatatttgacgtcggtaatactaggttggccggccatcttgccctacgatctcaacttcctagcagccatgtcgaggttcacggatatataccagctaatcctgctagtcgacctgcataacgaactccggtgccacaaatgcacaatcgctgcggatagacgacgtgcttccccatcgccatcgatgtgataaaccagcacgggctacgggttgcgtattctagcgtttcccggaattcgtaggccgagaaccatatttcccaggcttccccatccatacctatgtgatcgatgtgaaaaccagcacgggctacgggatgcgtattctggcgtttcccggaattcgtaagccgagaatcctatatcccagactcgcgcaggtcgagtcctcgtcaatcagcttatcgtccggtgtgtgtattccgtgcgaaccagctcctcgaggtgcaccttgggcagagcttgaaatcgttgcttagctcagactcgacaccttgtatacataaaaagaagacgagatcgcagcggcgtttgattcctcctcagcgagaacgtcgatgatcacgtgatagcgacacgatcacaacataaacgaaacacgatcatctcatctccgacaccaataccggtccctaacttggtagcgatatttacctgagacacgaccttctgcacaatatgagcatcaaagaaacacaacccccggtctcgatcggaccacccaggatcgagcgactccgatcaggatgctacgaaatgattgtcaaaggaaaacccttcctcattctgccagccgaaatcaacaactcgtctatgtcatgcactcgttacgtgaccgactgctttccgaggctcaaggcgcaaggattgaacaccattcttggtagcgtcggatggaatcaggtcgagcccgaagaagggcgcttcgagttcggggctttgcttcactcgatcgaacaggcacgtgcaaacgacttgcacctgatcatcttgtggttcggctctttcaagaacggtaagcgcaaatccccatttaaatgcggtccgatccgctggtggctcaactgaacttcctgcgctctcgcaggcaaatcttcctacatccccacttgggtgaaacgcgatgccaaacggttcccccgcgccaagctcggcggctcagaccagcgtctcgaattcaccgaagtcttgtcggtatttgaaccggcttgttgggaagccgacgctcgagcgtttgaggccatgatgcgattcgtcaaggatttagacgagaacgaccaaaccgtcatcatggtacaagtcgagaatgaagtgggactcctcggcgatactcgcgaccgaagcgtcttggccgagacagcttggaaccaaccggtagcctcgattctgattcgaggtctactcgaccgacgggacgagctccataaagcttgtcgagtcaatttgagccaggagattgacgggacatctctagcctggaaggacgtctgtcagacttctgaccaatccgacgagatgtttatggcatatcactacgctcgatacctcgaagaggttgccagacgaggcaagtcggtttacgacatcccgatgtttaccaacgcatggttgcgtgcagatacggaagagaccaacggcgtctcgggcggcgccagacctggtacttacccttgcggaggcccggtcgacaccgtccttgatgtctggcagatcgtggcgccttcgttggactttctcggccccgatatctacggtctcaaacataccgaagcttgccggacattctcgcaccgtggacaaccgcttttcattccggagcagtctatcgaaacgggtggagctatccgagcgtgggaagcgttggccacatacaacgcgttaggatgctcgccttttgccgtcgaccacaccgacgacgtcaagaacgcctttcctccccactgggagttgctcaaccggatcgctccgattctactccaggctagacgagacaatcttcccattaagggattctggtttgatcaattcaagcgcggcgaaaaagatcctcaacactcgcgagtctttgagttgggccagtggcgattgagcgtgaaacggccccacatgatctgggacatcaacgctggatatggcgctgggtacgggatgatcatgcagaccggtccagacgtcttcctgctcatcggtgccggttacaaggtagcgttcgagtccctaatcgaagcgaccacgttcagcggcatcgactcggtgcttgaaaaagatgtcattggacaggatgaagagggtgaagttggtactctaagaaaccttcgatggctcaacggcgatgaaacacgatcgaacactgaagcagtcatgccatatgcactcgaagacgttcacaaggattacaagctgttcctcgaatcggcgaccaccaagattctcgaatgcaaagtgtatgcaatcgtagattaggctgggcggaaatgacgatgtttgtactatatgatcatgcataattcataccatccaacccatgatggatctctacacagcctcgatagacctggtctcgcttgtcgtactttttcacctcgagactggttattgaactagggacatcgaatctagagatcatcaggatgatgggtcgtaatcgactgacgtgaattgacccgtttcgattgcatattcgcttcgggccttcggggccgattgtctccgtccgcaaatcaaataccggaacatccagtcgagcacatcaactagcaagctagcatttcatccgggtcgacctggcaatgccatttcggttcgagtaaccttcgtgcttgcctcgcaaagcaatagaaattacataccaagacatggcccgctcctccgaacacctcctttcctccgcaattggtccgactgatggagaccgctcgcgatggtggatgacagcccaaacgtctgatcgatcgcacgatccggcccacaaagtccgatctctcgaccgcccagcttctcgacgccctggttttgaaatcatcccggactcgcctcaatcaattaatccctacaaccacgttccgtgatcgccgatattgctcgtgatcaaaatattccctgtacccccaacgaaaccatcaaacatctccggtctgcaatctccgacctacgtcaagtccaaaccaagacatggagacgataagccgatgctcggcgatggcccacatctgatctgggtctcctatacttataaggacggactcgttacgatgatcctaatagcgtttgcctagacgatgacgacgattctctcatagcctcccaacaaatcacctcagctatacgcacctactccactactatgcagcacctcgccgatacacacgtcggcacggaagagataaagtcggactggaagcttgaagagctgcatcttgaagacgtggacgatgggctcaagactgtgcgacccaccactgttgttgacgctgctcctctctcggctttcggagacttgaccaccaagcaaaccgtcatcaagttcaagagactctatggaatgggcttggcggtcggattcgccgccatgtgagtgcaaatatgtcagcgaaccaagagctcgagtggtattaagctgactgaggcaattcatcttctatatgctttagctacatgggatacacaatcaatatcggtgcaaacgtcatcgtgaatgctggtacgtcgtgcaatgtgatacattcgtatttgctttcgtcgctgatcccttgatccgctgatcccgctcaggcttcatcgaacaatttggcacggtccgcgaccctcgaacccaagctctcgctctcgatgccacccatgtatccatttggggtggcctgaactttgccgctcagctcgtcttccaactggcttcacctcttaccgccgatcgatttggtgtcagaacaaatttgtacatcttgacgggagcaatgtttgtggtgagtcggtggctcgcttccagtgaatcgacttccttgtcgtcttgatttgctcacatctcgcctctcctccgcctcctctcccagtccattatcatcgagatcgttgccaaaaactggattcattgggccatcgccaaaatattttctggcatggcctcggcttataccggtcctgctatcatcaactaccttaccgagatctcaatgcccaggatgcgaggcgccatgctctcctcttttgccttcttcttctcgttgggtggattggcagcttcgatcgcgctgaaagtcttggacactgtgagttcgctccagccgtctggatgactccgagaactaatcagcttacaccccgggaatgcttgctcaccagtccacgcactaccgggcagctatctacagtcaatttgccattttcggactgtgggtgttcatcttggcctttcttcccgaatctccaggtgagctcttaggacccgcctccttgcaccttgttgcccaacgctaaccggacaacactctcgacagtcttcctgtgtagatcaggcaaggatgaagccgcaaagcgatctcttagtcgtttgatcggcaatgttcctggatacaatgtcgatcacgaattctccgtactcaaacacgaagtgaaaacttccgaagcgctcaccaggctctacagctccaatgactgggctgccatgttcaagggcaataacttctcgcgtgtcatggttagctcgtttcctctcatcctccaggtcagtgcagctctggtgaataattctcgctcccggctgacgcctcgatcctccaggtcttatctggtacacctttgatctttggttactctacgtgagcaccgctttggataaactaccggatcgacccttgatgtcgccgcgcttcgcatcgcaggtttttctttgccttgtctggattgggagacgctttcctgggtacccttatcctcaacctcatcttgttggctggaattaccatctcgatctttgcggttgatcgatttggacgacgaactcttcttctcatcggagctggaggttgcgccgcctgtgatattgcttttggaggtatcgggcaactgggtatcaatgaaaaggctggaaacgtcgttataagcatcgcttgcatctgggtcgtcttctacgctggatccctcgccaccgttggatggggatacctcggagaagtcagtacgttaaccttgaggtccaagacgatcgcctttgctaccgtcttgcaatcttgcatggctatcatctttgtgagtgaaaattgacacggtgaccgagttgcagtactaaccagtggttaccgtatcagcaattcactgtacccatcatgctatctcctcagaaagccaattggggtgtaagaatcggtgggtcacacaaagtcaacgcaccctctcgcttgtgaactgatgttccagactcgtgatctcgctcacaggatacatgtttggtggactcaccatcatcgggatggctattgtctacttcttcgttcccgaagtgagacgccttggttgtgtttaccttctaccgatagtcgatggacgcttaccgtaactactcacagacatccggccgaacccctcaagaaatggatgagctctacagtcggggcattcctgctcgaaagtttcacaagactgagaccgaagcacagaaagcgcgcagggctcctgaagcctaaagtgccacgtcgtcaatgacagcacatgccatgagagtcgggactcacgagataggtcgtagttcgactcaggaatcagcaacggaaggtgtaatggggatgttgtacgaactcacgtggaaatcagatgaaatcgcttgattctcgacaattgttttttttaagcatggccggcacagtgggtgcgatccagactgacccgaccctcgtggccagtgttctgcctcgaggtacgctcacatgaaagatcccagatcgatccttacaacacccttgagtgtcccctcgtgtgcaaacgtgattcatcaacaatggctccggtgacacctgtgaaacataggtcaacaccgccatcgcgtcaagagcgatctgcttgatgactgcgggagcattaacgaaagcattggcaactgtagcaacagactgagactcggtagggcatcgtttcctcgtccgtcccgtgagtcgacgacctgattcgcgccaaataaataaaagcaattcgtcaatgggttgaatgcctgaaggtcggcttgcccgctacgagtcaacgcatttcacctcaggaagaaagctggcactgtgacggtcatagtaagagaagcgatagtaatcagacgacactgaacatagctctgttggatcaaaatatccgtgagtctgcattacatccttcgagtgagccaacgatctttcaatcacgctgtactgagacaacgaaggaaccgacgaaggtagcggcgattcgactgattgaattgtctgtctctggctgacgatatcaccatagagcgtgtagacaccaattaacggtgcgaacgcatatgacccctcatccagtaacgcgtcgatgtacttcaagccgagattttgcttaagactcccggctcacggccaccttgcagcaaattttggccaacacaccacagaggagcatctgctctaccatagccgacgccggaaatgctatgaaacccgggacgggaaggcccgggaacgcagtcggtgttatggtcgatatcgcaaccgggggtgacgccgtggatgtcgcctatatacactcgagtcatcttgttgaaaagaccagctccgaaatattacggatcgaatcagattctccactacgagtcctcttggatggtttcgggtcgatgtcaggtcgataggttgagaacactcgaccgcttttgcatcgcgcgacgccactgacgcgaccccagcttcgggtatcctttgaacttgcccgatcgcatttacgcgagccctcagtcagacttacacaacgaatcggcgagtttatagagtgtgttaccaaagttacagtatccatacaaagaggagaccaggttcgaatcttagccaagagtctagtctatctatcaattgcccaattccacgtctctgaaccaccaaggacgctgacaatccttttctcattcaaggatcgcagcgatggcaatctgtcagcctggtcactgatcagggcgtgcggtccaagcggatcgttttatcgcccagtagcattacgacggagaaacagatcgagttccaggcgagtctcaaacaaaacaatttctgcgaggtcggccaggtccaacagcgattcggcgtacgtcaggacgctaccctggcggacactcccagtacattcgaatgcaatgacccgcggctcaaccgactttggccactcggtcctgcggctctccaatgagcctgcgttggggccggtacacagccttcaacttgggagccggcgacggatgctggactctggtgtctttgtccgcggtcaacgtcccgctcgctctgccaccttgaccgtaactctgcctgaaaaacacaggctcgagttcgagaccagaatacatcgaagtggattcggttgggttaggggctagctatgaaataaaaacagcggaaacagtagcgaaagtcgaatattttcgagatgcaaatacgacaatgcgaagctaataaccggtatcgatctgggtccccgcacgtgacaaaccggctaacaagcttgggatcgccggtcggcgttgctccaagcaggtacaggtgacgatcatctacatatcatgatcgctatgggttgaaagatgcctcttttactctctataccctcgtaaacacccttgtcaacacgatccaagctaccgaagccttcgcttgcaaacgctgacacgatgacaccaacgtcacgccaacccatcccttattggacgccctctctcgagcacatcgcttcgacccagcacgattcgtttcggcgacacgtcaacgagcgattcggcaagaactttggtccgaccgactactatgctctccatcggtggtctgtagacccggcatcgaacaatgatttctggacgagcgtatgggactggtctggtatcgtcggagagagagacccgcaaggcgtgagtcggcgagatccttgcggcgacccgaacgccagcttagcggaccccctctcgacgccaggtctttcgtccccaaggcgacatgtctgaccggaggaacccttttggatcgaccagaatcaactgggccgaaaacatgctcatgtcgcactcgaacgctcgatcgaaacaagccaccgccctggtctcgctgatcgaaccacctgcgggaggcaaggcggccgtcgagattgccaggtacacattcgagcagctttacgagcaggtcaaattcgctgcagcggggctcagaaacctcggtgttggtcccggagatcgtgtagcggcagtcacttgcaacaatgccggtcagtggatcgttttcggtcgcctagttcgcgctaaaatgccatcgatgacaatctcgcagaggcaattatcctcgtccttgctacgtcgtcactcggagctagctggtcttgcacgtcgccggaactgggagactcggctattctcgagcgattcacccaggtatgcttgggcgatcagagcggagtcgtaatcgacacaaagctgactctcacggtgccgattcagttcaagccaaaagtcctgctaacggtcgatcagtatcgcgtgatgggcaacgagatcagcgtggtccccaagattcaacgtgtcgctggagtactggcagactatggactcgaaacggtgatcctcgtgggccagctgcaagccgatcgcagggctcgtgtggatctgtcattggaccgagtccgatcgatccactgggccgactttctcgatcgcaacgcccgagacttggctttccaccgaggcaatgcgtatgatccgctctggattttgttttccagtggaacgagtcagtaatggcgggagtcaacacgatttgacgcctttactgaccctgacgtgcgatggcaacgatctcagccggtgtgcccaaagcgatcattcacaaccaatgtggaatcgtgctcgagggcaaaaagacggctctgattcatggcaaccacaaggccggtgatctgggtctccagttcacgacgtgcgggtggatgatgtggtgagctcgtgcggcatgttcgaacgcgaccttcctagttgaccttcatgccggtaggaactcgatgattcaagccttgggagtgggcgcgggtgtcattgcgtatgatggcagtccattctacccgcacccagaagtactttgggacgtagttgaacaatacgggtcagtggcatccataaatcccgcgctgtgctcaacgattcgcgcgctgtgctcaacgattcgctcgtgtctagcgtcacctccttcgggttgggcccaagatacctccaagtattgcaacagtccaaggtcattgtgaacaagacgcaccagctcgtcaaccttcgaaccatcctcagcaccggatcacccatgagttcagaactgtatagctttgtcaaggagacggtcaaacacgtctttattcagaacgtctcaggaggtaccgatatatgtggcggtctcgtcggaggatgtcaggtactgcctgtctttaccggcgtaattcaggtgcctctgctgggagtcgcacttgagtgctgggacgaagatggcaagcaggtcgccaagggggagcaaggggatctcgtcgtgactcagagactgccaaatatgccgctggggttgctcggcgacgatgagaagcgaagccggctggtcgcgacgtactacaaccattacaaaaatgaagtagtgtggtatcagggagatcacagtacgtagattccggagccactgatcgacctggacgcccaccctctgcccctcctttgcagtcgagatcgagccacgaacgaacggtatcatcatgcaaggacgaagtgacggcgtattgaatcctcaaggagttcgtttcggtagcgctgaggtttacgccgtgttggagcctctacgagaagagtcagtgccgtgtcagtgccaaaacagccatggcgctcacgtcgatctacccctcacagaatcgaagacagtatcgtagtcggactcaagaccgaggatggtgacgagcgggtcatcttgttcgtcaaacctaaacacgatcagctgacgcccgggatcgcctcgcacattcgcaacacgattgcgacgcaattgtcaaagcgacatgtgccggccaagattattgcgtgcccgggtgagccgcgcttaatccctggcgatttgaagtggcgcagctgattgaccttgcatgaatcgacagacattccggtgagagataaaggcagcgcaccaacaagcgcgaccgtattgacctcgaaattgccatcttgcgcttgctacccacagtatactgccacggggaaaaggctcgaggtcgcgctgaaaaaagtgatcaacgggacccatccgtccaaggtgtctactacgtcagtcttctcaaggaattcatcttcagaacctgatagcaaaactgactttctcgtcaacaatgtacagagcaatggccaatcccgagtccatggcctttttctaccaactacccgagctagaggccctgagaaagaccgggccggcggtcaaggccaagctctaagatgttttgcctaccgtgatgatgaggctgtcatgtgcacactctggaattttgtcttttgtatcgacggaacgtcagaaagtaaaacaaaaagagacattctcgcaacatttgtacaaaccgatagctcgtaaccgaaagatgtcactcaaacctcctgaaaagtcgaacgcaaacgaatttcataacccatcattgaggaacggggtttataattcgatcttgattgacaggcgaaatattctaggtccccttttcgtcgctgcttttccctgtctcgccgcgttgcaagagacctgtgacggcatcccagagcctcataccggtctcgtctgactggcaccgacagtcatcttgtcagtgctaaacagcgttctttcctggtcgtaataaaaacgatgcgttggcaaatcttcgccctctgctcgtccctcatcgcagtgttttgaccgtggcaaatggacagggcaattggtaacctgaaagtgcctagttggtaacctgaaagcgccttctcgtcacctgaagctgcaacgatcttgcaacgcggtacttgtgacaagagccaagtgctccgctggacatctagcgattggttatgtagtcgctctgacaagaccccctgcgcatacccgttcacgcttttacaaaaatctttcttgtatagcttgccctgacgcttaaagccaatagagttgctactgcggtactgcctccaacgacatactgacatcgagcaataggtaagcgagagcaaaaactgccagaaaaatcgatcacctaccatcgtcggcttgtagggcgcggctccggcgtcggttcctccaaacttttccagcagcagtccggccgtcaatggcccgatcaatcccttttgaaacggaagcctgccatcagtcgagaatttccacaacggatcaaaagcacagattcgcttacaccaaatgactgggccatctcgatccagccgattgcctagagccgcgtcgcaagtcttcttggttcagcgtacatttcgtcagcttccgacgtgttcgagcctcacctggtgaatccgatgattgccgacgacctggcccacaatggaagactgcaaaacgaaaggcgccttgattacttggctgtagcgtcgggagatccgggtcgaccaacctgcaatgagaagaaaccgccagaaccgagtccacaccagatggagaacctattttccccagccgccgtatcgatcagccttcccggtcttgccgacccgccgattgtccgactcacccagctacactagcaaaagtgacactaaacggccatacggtcaagctgctcaatagaatcgacatcaaggcgatgatccaggaagtcaagttctggagacgtgtccggtagcatgagcctttctgtgcatcgatccgtgtccaggcagactcacaccgacgagcatgtctgccatgtagccgaatccaatcctgccgataccgctcgagatgttgtacaaggccgaaaagagggctccctgactcgcggtcattccgatcgagacggctgaccagaacgcaatgggttaaccaacgcttcggctcgacgtgacgtcgatggatccagcgcgactcaccatactgcgggaggtaaaagggagggatgaaaaacggccagctaacgatgacacaggtcaagacgacccggaggtacatgcttgatttgaagatgctcttctccgtcgtaggcgtcacgttgctcccggacaacggttgcgtgggtcggggttgcacgccgggtcgcaaggtgtaagcggcggggacgcaaagtacgagcgtagacaaccctgatgagtcgagcacatctatcagctcactcggactagcggattgaggtgagaccaccgcgtccgactcacccagaaccctgtatgtccaagcgagtcctacgctggcgatcagtttctcaatgaccacgctccagacggcgcctccgatccctcctccacacgaggtgattcccgtggccagacctcgtttcctcatgaagaattgcgatggcaaggggtagacagtctgagatatattttgagcatcgtctcactgagctgcactatcgtcagccgtgagactgaccatgaacaacgctccgttagcgatcccggcgcaacatccctgaaggacgatgaggccgccgagactatgtgtcgcgaatgaacatagaaccagtgatcccgaaagaaatacaacgccagtcaggccgacgatgcgcggcccaaatcttcgcaagaggaacgaggtctataacacggctgatatgagctgagcgtctgagagatacgaagaaggaccaccagagcgcaccgggagacagaatgcggcggtgaagaacgcacacagacctccgatcaaactcaggagttgtgatccgcccagattcttcttgccgaggtcggcttgaatcactccccaggcgtagagcaggccgagaaagtgaaaggcgatcagaaaggtgcctgtatgcgagcaaccgtcgtcagcctcgtagcgtcgctcgcatagtcccaaactggactgacatccgacgataacccaaccgaatccaccatcaagatactcttcgtgcccactggtgtccaaatcgatgctctgagcggaactgcccggtgcatagtccttggtgctgctggcggaactctgagcaggtcggacatcgtcgccgatcgacgtcctatggaacgcccggtcacggagttcgatcgagtcacctcgctgtatgttgggtttaggagttcccgagaatgacatgacgtgggtagaggtggtataagtccttctggtagccctgtcttagaggtccgagggtagcatgcaagtccaaggtcgtaaagacgcgatgaatctagctcgtcccagctaaagttccagactcgggcggtacctgaccgacgatccccgtcaaacccgacgcgaccaatacggtggatcgcgcttatgcgaccaacgagaccgaccggcttgctaccgtatcagtctgagattgagcgatgttcacttcgcagagatcttccgatgacaggtgtgtagtccgcagatttcccgatccttgcacggtatccggctggttgcctcgggttgggggtgggcgatgcgtaacgtccgagtcgacggctgactccggtataatcgaactaaccctcaattggatttgtttcgctacctctgggcaaaaagaaagctcgacggactacgagagcaaaacatctttcgacaggcgcgtgcattgtcatggcgatatatctttcacctggtctccttgcatccatgtaggatgaatagtactgaaagacagggcggcgacgggacaagctcgagtgcctttaactataagattatcatctgaaagcgtcgaaatcattcccgagctggtcgcgattcggtacacacatctatctttgcaaaatattccctccaactcgaataggatcactgtgacagtatggtgcgccttgcctagagcacaaatgtgacctggaacacgctcatccatcgtcgcgtcgttttgttattctacgctgggaccaatgacatgaacatgtcgagtggtcgacggaacaaggagtgctcacgattgtagttgtagccgacggtatccatccttactaaagactctataaggttatgatccgctagtcaaactggtctgcgccgacaggagactcgtcgatccgtacacgacctatcgcttcgccggtcgatactgtcagagcggcttgaggcgtcgcaacgtttctcttaagcagaccattcacaaggatctctggaattcgggacgtactatattcttcgcgccgacgtattcactcatcatggcaatctggtcccctgtccagccgcctcgagcccaacgaccaaagactggcaacaacctgccgcagactctcagcatccattttacccattaatagatagatagcatgtgcttcacattggactcggccatgagcccaatactgtgactgcgtgtagcgagaagtcctgaaccttcatccacatcttgatcactcgaatatgccccgccgccgaatgttgactctcgctcgtctagcgcgcttccctcgtaacgcgaaggacttattccggcaggtcgaatgagatgcgaaaaggctcattcatcgtcgacaaaagctttgtaaatcggtccaagatcatgcacctgagattcgaggtagatcgagacggtagagatacagaggcctagaggacaatcctgcctcccgaagaagcgtcgccgcagacctaatttctattactgcatcaagcggcttggacatacctctctacctgcacgaatctggtccattggcattgctcctgaacccggacaccgactcacctgtatcaacgccatcgaaagtgaatttcttcttcagagtctgacatcaccaccacagtcatgacgacaaacaaggccgaaaccacggcagcggaagagtacgagctcccccaaatggccgaggcaggcccttcatcgctgccaaccttttcacctacgactccgaccagctcgaccaaaccgaaaccatcacgccgccgatcgagtggggcgagaaagacgtttactttgcctggtaatcactcggtcttgttctcgaatgaaaactacccgcccaacacgaccatcaatgagccatcacccaacggtgctaacggagggttccccgctacacctccctttcgccgtcgacatcacaagcggccgtcagaaccgcagacaccacgaggacatcctcatggtagtcttcagatcccttccaatcctgcgcatcacgacctgttcctgcatgaagaccacggcaccgagacggtcgaattgcccgactttgtagggatgcttggtctgaacgccgagggtgaagacaactacctcgtcgcccaagccatgagtcgggattggaagcgacgtctgtttctgctgatggaggaaccggggagtagccgcgaggcctttaccatccacgtcatgtcgacgggagggatcctgttcaggtcagtcgagggttggctggtcttttcgaacgacgatgctgatcataaagtaatgctcggcttatgatagcgccgttttaaccatcttgtcaacattaccgtcctttcacacgaatcctgcgtctaccaaggtacttttcggactcgacgtgatgatcgtcgtgcttttcacaatagagtgagttggaccgtaaacaatgtctcacttggctggccccgtgactaacgcacccgggtctctccttcaggtacatcgctagggcaagtcgagcgggagcactatctcaccgacaggcttcgtgttgctgatcatcttcactctgccacccccaggtcattgctcacagcgactctttgcgaatgctctggaattggtcgacgtgtagggacagaatgcaccgagcgagtgtgaaggaccctgctaacctctacggcctcccctgttgcagcctttttcgccattgtggacctactagctatcctgccattctacatcgaggtggctttgcaagaggatacggcaagtcggactgcctcgaccacgaaaccactcggctgacccgaaccgaatctcgctcagaccatcttgttcaggttttcaatcctacgaacgctccgtctgttacgagtgttccgagcgttcaagtaccagaatcagatgctcttgtgagtgccgaagatttgcgccgtcgaccagagatggccggctcatcgacctcgcctcgccagcacgattgaggtcatgtacatcgccgtccatcgatccaaagacgccctatttgcgctatccttcttcctggtcatggctttggtcatcttttcgaccctgatctactttgtggagcgaggcgtgtgggacagcaatcttgggacctttgtgaccgcggatggtgagtggcagcttgtttgttgaggtcgtcgatctcgcattcaacgtcggccgactatactaggcgatccatcggcctttgaatcgatcccttcggccgcctggttcgtgctcgtcagtgagtcgcaatccgcatcgaaaaatttgttaccgtgtcgctgaggcagatcatgttcccggcagccatcacaaccgtcggctacggtgaagtcatcccgagatcagtcttgggccggctgttcacggtacccttgctggtgttcggactgctcctgatcgccctgccgagtttcgttttggggcggaatttcgccatcgtctttgacgccatgcaacatcagctgaacgttcccgtgagtacgagtccatgtcgatggatcgtgatagatcgctcaaggagtcgcgccgacaccccctcaggtcaagccttcgatggcaggcagtgtacgcagttcgatggatcgagaaaccgggggtctgcctggacctggacccggaccccatcgtacatcgattccatacccgccagaatccccttcgtcaccgccgtcgagcacgttcagactggcggacaggggcatcgtctcggggggcaatcagtacgacgccctgcccagtggcgagccatcgttgcgtacgacgatcacggacgtcagtatgagcgggggggacgcatatcaccgctcgaccagcgctcaaggtcagaaaaagggtacgggggccggggtgagtatgggatcgaccccggcaccaacgacgtcggccaaggacctctcgaatgccaagttggcgttgaatcagtcggtaagtgcgggcacgcgttgtacctctcgctcgaccggtggctgatcggcgtcgatcatccaggtcctgttgagtcatatcgagcgactgactcaggcgactgaacggcaaggagagatgctagaccgaatcatgtcgatgctagagcctcgaaacggcaaggcaatggagacgactggctcgtcattgacctgacatttgtctcgcgtcgtgctgcatgtatagaggtatccagtcgaaatgatcataatgttttgcatctatcgacatcctgaacctcatgctgctctcaatttgctggcgagtcgatcgatctggacgtccctgagcgcgttcttgccaatgtatgccgagacgagggagagggcgagaaaaggtggtaggaactatgccaatacgccgacgtcgaaggttcaatacgacccacttttttcgagccgaaagtgtcagagatctatcgcgcgactcacggtgtaaatcctgccgttgatccagtacttgacgatgagggcttcgatcccggcgagggtgccgaggaacaagtacccgttgttggtcggactgggcatcctccttcctgacaagaggctcgagacctggaccgagatcgatgggaaactcagctgggcgcccggcgtatacccaggtcccaaaacccgaactcaccatgaccgcgagccatccgacctgtcccaggacgatcaacgtgccgatcaaactgacgacgacgttgaccggcttttcccccgtcccaaaagtccactcgatttctttctgcgtcttgaaagccggatcgcgttcctctttgtggtcgagggaatgacggtgggggagtgcgggcaggagacgtttccccggcaaccggagagccatgaccggcgaggtgtaagccggggatttcgtctgcggggaagagagtgcgagggaaagagtcaaggtcccgctagatcgtcgaagaggagcgggaagtgcggaggctttctaaatcgcgacgagatcaaggtcgatgtctgtatgagctgcctgaccgctgctgactctcgagctattctgtcgccgagactgaccagttcgaacctggccttgccgtccgatttgacgggaacctcgtacgtccagctcgagtcggtctcggcgtctgtaaactcgacgtgggcgtacttgggagtgggttgggcggtgaatgtcagccggaggataccatccacttcgaggtcgacaggcgtgtccagcttttggttcggttgtaatctggtggtcggacgacagcattgagcgatcaatccaaagtccttgaagctacaccaaaaagcaagatggccataccacgctagaacactcacttgtacgtcttgtctgatccacccgtcgccgtagtgagcaagaccttgatgtccttgacgtcgatggcctgagcaccgatcgccaagatcgcgcacgtcgatgcgaggagactggaccagcgcatctttttacggagagttactgcacaggtttgctatgacctgttaaagttgctggcaggctaggtctaggaaaggaagtcaggtatcgttgtctgacctgacctgatcatgttgaaagggaatagcaagtcgagtgacgtgtgaggtcgatctctgcgagggaggccatgctaaacacggacatgaaaactagctcaatgtccgcattcgactcgacaaccacctcaccctctactctacagctacgcatgatggtcgggatctagcagcatcattcatcacctttgaaacttgtattgtcgactagcaacatcagaagaacagatcgcaatccacttcaccaggtctcgcttcttatattcagatagcatcattctctatcctcggaacacgaccacatctggaccatcccaaacaggaacaggcgtactttgcctcttcacgcccttgagataaacctctcgcccctctcccttcaatctcctcgacgcaagacaggaaatagtcgttcaagatgggtggtggtgatttgaacatgtatgtcgaccgtgattaaattggaaagatcaaacacatgctcatcgtcaacacgtctctcaccgcgaccgcgatcacacaggaaaaagtcgtggcaccccgtgctcctgtccaaccaggccagggtatgggaggtcgagaagaaagccgtgagtagcattctgggtactctcttcgacgtccgctgtcgttccccgtccgacgcgtctatcctttcccttgtagcacgaagagaagaagaagctcgaccaactccgtaaagagatcgaggaagaacgtcaactccaagaacttcaacgactgcaagaagaatccaccggtcggaaacgtgtcgaaaagctagattggatgtatgccagtccggcgacggcagaaggtggagcgttggggggtgccaagctgggggaaaaacagatggaggactacctgttgggtaagagacgcgtggacgaggtcttgaagcagaacgaggagaacgtgcgtacgagctagtcggggctgccacgcttgacgcttcgctaatctgctccttgttgctttctgtggcagatcggagccacctctgaaaaatttcaagccattcaaagcgccaacgacgcgctcgacattgcttcgaagatccgtgaagacccgatgctcgcgatcaaacggcaagaacaggtcgcctaccaagccatgctcaacaacccggccttcaggaaacaggtcaaggagatgaagcggaaaaaggaagagcccaaggaggagcgcaaagagaggaaacggagggaaaaggaggtacgtccggtgaccggaccatcgagaaatgcaccggactcgagctaattcgaggtggtctatctacctggtcttcgttcaggaaaagaaagccgccaagaaggaggaccggtccgagaggtcatcccgacatcatcaccaccacgaccgaaacggacactacggacacggttacgagcgcggcggaagcagtcgatacctctactctgacgacgatgaatcccgttcagacgaatacgatcgacgtcgttcagctcgaccccgatccagatctccgccacgacgagactcacggtcatacggcggttcgtatgaccctcgagactcgtaccacgaccgacgggatcgatcacccgccgggcgtggacacgggagggacgaacgggaccgagcatcgcgtggacgtggtgactcgagggatcgttatgacgacagacgagatcgtgatcgaggaggtgccatggatggcgggttcaatgaacgaccttcccgaccaccaccaccacccgcccacattcatcctgcccgactcgccaacattccttcgccggctgatgtcaaaccgaaactttccgcctcgtcgacaaccccggcttcatcagaccgtgccgcccgtctagcccagatggccgccgacgccgactcccacacctcgtcccgtctggccacgctcgagcaacgccgaattcaagaggaacaacgcgagcgagacgaggcacgtgaacgcgaaaagtacggcaagcaggacaccaagggagcgtacgtcagggaacaggaaaagatgatgatgggtggaggtgcgatcggacttggggacgtgctcggccgacggggtggcaagggtttgctccgggaggacctctgagcatggccggtggatgtgtgtgtccagggagtgtatttccagtcgaacaatgttgtatcggatcccatgccggatagtccagatgcgtcttatgattccagtgcaagacaactgacattcgcattgatccggggatcttggaaccgggccatgcatgcagatcaggtcaggtcaggtcaggtcaggtgtattgaccgcgtgtcatgggcgaccaaacgtccgagtgaatcgtcgagttttggccgagaaaagtccgaagtcatggccgaggacgtgatataaacagtttgtggtcggtcgatccagagacgttcaacgccgaaccactcgtgaggatatactattagtgacggccctaatctaacgactccgctcatctcgatcgtagcgaccttgatcgacaaaatgcctcgccactatgaaaccctgacgggtaagttggcattccgtcggggggtgggggggggggcctgattggcaccgcggctgagaccttcagaccgtgaaacagccgacatgatcgaccactttatggagttcgggtactgcgtcgtcaagcaagcctttaccctggaacaagcccgtcaggtcgccggcgatgtctgggtccgattgggtatggaccccaacgactcgtcgacttggaacaaggtgagtggatcgcgctaaagcctttcccgaccgactaggcgcgcgacatcttaacgtctcttcacttgtctttgcgtcgatctttgtttgatcggttgtcgatcggatccattcccttcctatacgacgttttcaacacacgcaggaacgtatcaacatgcccagtacgtatgcagacgtatgcagaattgggcgccgctattcgtgacctttcggaacattgacacgttctgggcttaatggcacgtcacgcagcgcatcggcaatttccgctgaaggatttcagtccaaaggcgtacaaggtcatatgcgagatactggtgagttcgctacaattaacgttaattctagacgccgagtgattgttgtttttcacagggaggagaagagcgcattagcgacgagcacaacacctggaagtgagtcgccttctgccgaaggaaagattgtttctggtctgacttgaagggttaacctccaagtgatgccctgattgtgaacctggggacgtcggaatatgccaaggaagagactccccaccctcgtgaactcgacaactggcattgcgatggagactttttccgtcatgtaggtcggcgcacgagcaggacaattgtcacacatcgagttgatcgctcgctactttagtatctggacagcccggagcaaggtctggtgagtagtctgaccgccaactgactttaccgtctcaatttggatctgatcaccctcgtatcagctgtgcatccccctgttcagcaatatcgaggcccgaggtggaggtacgatggtagctcctgacggtatcgagcatgtcgccaaattcctggccgccaatccagccggagtcatgggtggcaaagagggcgtcgccaactttgatttccgcgggctaatcaacaagtgcgaggtgtttcacgagatgactggggagatcggcgatgtaggtctgctgcgctgctttcgtccgtcccagaactcaactgaacacatgacattcgcaaaggtcgtcttgatccaccctctcatgctgcactcggcttcgcacaacaacacgcgagttccccgtattatcaccaatccgcccgtctccctcaaggagccgttcgttttcaagcgagagaacgtcgacgactatagcctggtcgagctcaagacgatcagggcgctcggagcggtaccggagcagggctacgactttaccatcaccgcccctcgggagagggtggttccggagcggatgaagattcagagcgtgatgaaggtgcaagagctcgaaaggctgaacaagcagcgtcaagtctcagtcgaggcgtaatcatgaagaggtcgaattaattacgctcgccacattctgctactttttacacttgcacatgatatcgagattgtataaattatgatgatttgtcgtaaagttgtgtggcgttattatgtgcgttggtggcagagcatctctgatgcatagagctgggactcgaaatcacaggaaggctggcctgtcgacgtgatagtccgagtttcgcgattgcgaggcgatggtgtgccacaagaactacgaggggtcgctcatcagtatgggtggcctacaagtcacaccgggacaagtcgccttcaactgaccttttgccactcttcgacgacaccccctagaccgtaacagtagtgaaggcagtcattgggcggcagcaggtgcgaatcgggtcgctgtacgctcattggccagatatcgaggtattgcattccagtcgccacgtcctttccaggtccaccggggaccgctccgagtcgtttcttccatcggctgttcagttgttcaaagagatcccagttgtaacgcatgaattcagggtccttggtcgacctaaagtcggtccgagcttctgccgtcgttgaaagttcgcaatgagggtgaccaggtgcggtggctcgccaaaacacactctgcttggcggccgggacgttggagaccttttttagcaaaagctcgatctggacgggagcgaaatcatgaggatgagctgcagtcgatcgagtcacggggatctagtctctcaccgtattctcccagccgtcgagcaattgtgggtagtaatcgatgtccttggtcgtaaactcgtaatttacccaatgaggacccgagttgaggactagcaccgtgttctcctcgatcgcaatgtccgggtcgacctcgacgtccgggccagtcatgaccttgaggtactcgttgtaccatatcgattcgctgacccatttttcaagaccattgccagaggaaaagggtacatatccctcggcgccttgcatgacttcgtccatctcgtccctgctgatgaggtgacgctcaaggtacatcgagacgaccggagtatcgcatcgggacgcggcgacgccagccgatcgaaggataccagccgtgagagggtgattcttgttcaacatgatcccctcgaacctaggtcgatcgccatatccgacggtctcccatggtccgcctgggtagaccaaaaggtttctcatgatcacggcgtgctgttccgtcaatgaatctccgacgatactggaggggagtgtcagtgttatagcccgctggagtgaaacgtcgagccatcgtgactcacaacatgcctcccttgcttcgaagtagccgcttgatcaaggcgctcggagctagctcccgcctcttgcagtcatctgcaggcacccaacggtatgccgctgcctggagcagccggtcgacatgagcaggctcgtcctgtgcgggctctcccttcagttcgattggccactcgatgggatgacacccgagggctccggattcctgttcaggcggggtagaagagcatatgacatctatcagccagttgatataggaacgataccgcatacaatgctcacgctcaacgagtttagtttgcgaatatcttcgagagatcgagggggatgagccctcgcttcccacgttccgttcgcgtattggtcgacagtacagtacgccgggccggcctttttctgggatcccgcggtggattgcgccttggaagctcgtcgtcgagtgtaggtgcccgacatgacacgaggtttgcgtacgggctgcgagggcttcgctcggtttcttcccatcatgacgctgctgacggtgttgcttccctcccatgtttcggaaatggatgacgatctgagtccgttccagtaagtgtccagcaagagggacaggcagacgacgaagagcaacccgttgagtgtccacagggtctttttacctcgcacccatcgccggaaatgtgttcgcagagagatttgtcgcatgataaagtgcagctgcagtcgagttgttttgatgttcaaggacggtaacaggaagttgatttgattttcctcgtggattcgaatggccttgcatcttgtagataacagagctaccgatttgatagctgacgagaccggaacgatcgaccgtgacagatgtcgcgatcgactttcggcccgcgaccagcccctcgagctttgaattctctcggcttgggagactgaacatcgacacgctgctgcgagctgacagtactggctctcgcacctggccttgccttgccttttcggggacacgacgtcgcattgttccggtgagtcttgtttcagggacggaataactgttggctggcaagtcgcagtgatgagccacaaggtagatcaagtcacggtcatatagatcatctgagacagattgcaaagacgagattccccgagtctcgctgaccgcgccattcgctgccgtccacaaggtccgtgagtcagcgggatgagctgtgcgaatgcatctcggcagagtaatctccggcgttatcaatcgggtgatgccgtacacagctgtcatggggcttgaacgaccgcgcatcaggtaccgtcgttatcgcgcgcgcgacagctcggtcagcccccgtgcctgcggagtcacccggtatcgaggcggtgtcgcagaggtgcgagccgtggaaccggcgatgacccttgacctgtgacaagcgcaccttcaagcaaagactttgctccggacccttggccctgcaattcatgagagtcagcgtcgatattctgagcgcgcaggaatgtcaggccggctcgccgttaggaacttcatataacgagcatacggtcgagactggttctgacgagcatgggtgaaatacggacgatcttgccagcgataccctccagaacaagtctctcgaccccaaaccgtaccctcattgaccgtttccctcgcactcaggaccaatttgaagcttctcctccaccatgttgatgctacggatcaaatcggtcgcagccgtcttttcatcgttcgcgctggtgagctatgtcagccaaaaatcctcagccatctcgccagcaatgggagacatggtcaacgcgtttttcaacgtgaacgtgtctgaaacagagtggtcctgcgatccgtaagtctactatttgggtcccttgcacgtcaaggcttagatactgaatcggataccatatacaggactgctggccccggttgggtgtctgaagaaggcgtatggcaacgctccgacaacgcgtgccagtccaaccaattcatccaacgattccgggataccccttcaacggaatacgtcgacgagttccccaccctgatcaacaagaccatgttcatcctcggtgattcggtcggccgacatctatgggatcagttgtgtcaagagattggcgcgcctaaaaccgttcgcaacccacctggcgtggatcccgtcgtccattactccgaggtatctgtctgcacccaacctgaactcaactttaccattgttggtttccaccaatacggtcagtatcagaggttttgtatgactgcgagacccgaatcgcccgactgatcgatccaaacggggcgtttagggttcgccaatgccaccgaccccactacccttggatacctcgaaaagtgcttccccggtggaccttacgattacgagacccgagtgcccaatctctggaacacgcttctcaccgatatccccgaacccgattacatctccctcagcggtggcgcatgggactacctctacatgttcaaccgcgacattattgagaagcgcttccaccactcgatccccgaagaagacttgcaaaccttttcgggtcgccttcgcggtttgattcacatgatgggcgacatgttccctcgaagtaagatcgtgtggatcaacgtgcaccccttgaacaacgtcgatctcggcgccaagcacaactggggcggcggctacttccagcccccactcgatcgatcgcaagactcggtcttgttcccccctctcttcagtcaacggagactagctcagcatgcccaaacacttcgacaagctgccgaggaagagggtgttgattcattggacgtgagttactggcttgaatgatgagatgtatcgcattgcttacgatcgaacgatcttttatgaatcgactacagtactggaaactcaaagattcgttcaactcggacgacttttgggcgcccaacgatcccgtccaccctggcttgcagccacgagtagcgatggccgagatgatgttggaaaagctgcatcgattctccgcctatggcgtatgatgacgtggtcgcatcaaggtctcgatgattttgcatagttagtaagcgttggacaggccatcgctagcacaggggccccgattattgtataccatagatgaggtagagcgttagcgctcatggaacatataatgatgacgtcttgtcggtgcgacacaaaccctcgccacggtcatactttcatacgtgctgatgcgtcatgccccacgagatcggctgcgtgcgtgaggtgttcttgaccctgtgatagacgcaacacggcacaatcagctggaactcgccatctcacgtgaaatgtcatcgtagactgctccaccaatgcgtcgatgtgcacgtatcaatgataggtcaagatcgacaaccgctcgttggaatcccagcctgacattgaacgatttgacgagccgaacagggcacgaccagggtacgattcagtgtcataaagagcgacagtacctgtaccatcggcgtgtcagcaaattcctctgaaaccgcatagtcagcctgtcaggccaaactgatgaattttctcaccgccggcggttccgacgagccgagcggtgcaatgagtgggcggcggatgcacgtcaacaaaagtgaaagccggtcagtcatccgagacagagcagtctcggtggtccagatttctccttcgggataacgctgtgcaggcacggggatcgatcaccgacctgatgccgtaaactcgcgcgcgctataaatgcgtcggaacgcgtggcacgccccaagcagagacttgtgccagtgccctgggcgatgattgctcgaaatggtaccgggagtcatcaacccatgtccggctcaactcgactcctctcggtgacagtcccggcacacaccgaattgccacgccgaccgatcgccgttcggacaatttgtccaagttcggaagcacccgacccgtctctcagcccaagcctgtgcgcacctgcacccgctctgtccagtgcccgatcgtcttctctctctgctcaatctgacagtcgcctactctagagcgactgactcacattcaccgcgacattcacctcgagacgactaacccagaaggaaaaaggggcatgctttgtctcatatcgagatgacagagcctctgaccatatgtgccagtctgagaacgcgcaaaggcgaaacgtgcaggtccagcgcgttctcggcctcgtgtaggcaacgtctcctttttcaggtatatagtacgggttgcaagaggttcaattggggatagacttttgacacgatgaggtcgatctttacaactcctcatccacaagctcgacccataccatgaacgtcgaacctctccctgctattgtcttgtggcccgccattaagactcgacccagtagtccccctcctagtcccggcaacgatgcgaagcccagcgaagctttgccatccacaccacccctccgagctggtctcaaccaacgtgccgagtggatcgccaacgtcgactcgccctttttctcgcgtcacaacgtcgggcccatgacccctcctctctcgccccaggaatttaccttcaagaagcctctgtcgggacgttcatcacctcctgccaggtaccccttgactatgggctacgatggtggagcctcttcgtcgcaatccgccaacgttcccactggctcgccctctttcactacggtcgaagatggacgacgtgcatctttcgagactctcaaggagaacagcctccactttgtgcgacgcatgtttccccctagcatgctcggaatcaccttggatggcgccgggaccgccgaagtcgaaaagcgcaagatccaatccaaggatcgacggacatcgctatcatcatcatcgatgaagtggcgttacaagcgggtctggcgcaagcgcgcgctcctcttcatcctcctacttgccgtgctgtatcaggcttacaaggccgtcgtcggagttgacctcggctcggcgcccagctcctggctcggcggagaggatagttcagagcccagctccaagtacatgcgatcgaccatgaagaggaccaacccgaccggccgagccgccgctcctacgtctcagcgacaaaccaggaagcagcagagggtccagtcggtctcgagctcgctccacccggtcgaaaagggtgtcctcactgtcgacacctcgctccccgtcacttcgcaccccatcctccagctcactcaacatgcccgacgagaatgggacaacaaggtcgcgcgtcagagcaagactttgcgtgacgccgtcaacgagtacaaaaaacgaaaccgaggcatgaaccctcccaaaggtttcgacaagtggtggaagctcgtcaagtaggtattcattgctatcacctaccctgtctcaccatgcttaccgtatctgccacctctcagggagaacgacgttcaacttccggacgagtacgaccagatcaatgccgatctcgctctcttccgcgcattgtctcctgccgagctcaaccgacgagtcggcgatgcccttcaatatcccgacaccttccacgtgatcgttgaagacggccagatcgctactggtggtacctttgccgattccgaaatcgagggcgctcaggatcgaatgtcaggtcaggtcgatctgctcgcggaattcgacatcatcagttggctgcccgatttccgagcggtctttggtgtccacgacactcctctcggtttcatcggttccgatcaccggtccgatctgctgaacgctgtcgaggatgaagagtgtgagtagagtttcacccgggttgcccctttaagccctcgatctaacttgctgcgcgacttgcagactacgacccttcggaagagctcgacgtctctgttcgaggctgggctgctgggtgtcctccgcgatccgccttgcgacaggtcaagatgggcggttccattgtccaccgacctgccaagtcgttcgttgccgacatcagtgccaacaccgacctatgctctcaccctcacctcgtcgacattcacggcatcaccgctggcaaggctcccaacgtcgccggtcgactcgaggccatgttctcgctgtcaaaaacttcgcttcacaccgacgtcctcgccgttcctgtcgagcaatgggtcgagtcactgccctcgatcgagtggtccgagcgaaacaacaccaagctactctggcgtggatccagcactggcgtataccactcctctgccaccccttggcgcgagtctcaccgaatccgtcttgttcatgctaccaacaagtatgccgacggcgagatcgacgttctttctacccccggcatgatccatgaaggcgacgctatccctagcatgcgagaatcgatgcaacacctgcacaagggtaccgccaacgctcgtctctttgacatttcttttgccggtcgacccatccaatgcgaggtcgccgacggcacctgccgagaattggccgaggattacgacttcaagaccaccttgatgtctttcgaagaggcgctcgaatacaaatacgtcctcgacgtcgatggcaactctgtaagtagctatgggaggatcgtccgtagaccgatcagcagcttacgatcttgttcaatagtggtccgctcgtactcagcgactcctcatgggcgggtctctccttttcaagtcgagcatcaaccccgagtggtggtcagaccgcatccaaccttgggtgcactacgttcctatcaacatcgattacagcgacctgcacgacgcctttgcctttgtgagtaccgatcggcgtcgcactgtattacacagcgaaactgactatgaatcttccttcagttccacggcgatgtccgaggcaacggtgccaacccagagctcgctgagcgaatggccaaggagggtcaagcctgggccaagtctcattggcgacgtgtcgacatggcggcttacatgtcccggctgtacctcgagtgggctaggctggtcgctcccaaccgatcctcgatggatttcgtctaccacgagagcatggaactttagagaagagatattggccgacaggattagattattaccaaaagcagggaaaaaggacccgcaaacgttgtacacctagattaacctccgcgattataatgcatcagatcacacccgtttgtgggcatcgtcccgtccgagaacctccgagtccctttctcgacccagctgaacacgatcgagagaagcccatgcgttgaatgcaagcgaagacgttcgagtgacaggcttgagcgtcttgggcgcgactcgctaggagggagaggggcttgaagctcaggccaacgctgtcatcttcgaacaatcacgatccagtaaacccatacatgtaaatgatagatagaacaagtctgagatacaaggtgacccacggacgaaacctgatctatagtccgggcaacggcatgatgggttcctgatcaacgtaatcatcgttggccgcgtcaatcaccatgaggtgccacaggaatgcgatccactcgtttggcgccgaaggaatgcaataatgcatgcaatcgatggcgggtttgaggtgggcgtcgggtcgtgtaatgctcagtggccagacgtccaggtatctcatcggttccggtgcgaacctcagacgagccgagctggtggatgggcgatatgagagacgagacgatgtatgcctgttcatttccgggtaggcgttccagttgaactgttcagctagggggttggtcacggaaaagtgcgaggttcggttattgacggctggtgaaaattgttgcaggctcagtcatgggatcttcgtgaccagaccgtcgtgtactcacgctcaggatactgttcacattctgggtctcccggcgataccgccctccaaaaggccaagacttcgttgctgggtagcggacgaagcttgtctagcacgcttgccacctagaggccgatagccagagtcagtcgatgctgcgagtcttttgcgtacttgtacgacgagaattaccagcttggtgtacccatcggcgaccgcattcaacgtcatctgcacgggatcactagcgagttctcctcgacctggacagcggattgaagccaatccgaagatcaaaaatcaacgcggcacggcaacgcatatacaccacgagattcgctcactccaatggggtccgacgttgaaaaccaagacgctcttttctggccgtacggcaccttgtggcaaccgattatgcacgtcgtaacccacgggggtattgaatcgctcctgccacaacctccaccacttggtatcttcgaatacccattttatcttgagctgctcctcggtcctctccttccatggagtatatccttgaacaccttggaaagccacgtcgagctcgtcccttgacatgacgtgatggtccctgaaaaagttgatgagcggggaattgacccggtcatgtgtgaccctggccgcgttgagcaagggaatggccaaggggtgggacgggttcatgttgagccggaagatatggtccggagttccatcccaccagaacagaccatccgagcctgccatgagcgcggtgatgacgtggaacgtgtgctccgtcaacgagtccccgacgaacctagagagaggaagacggagagagtggcggtgattgggccatgcacgccatcagcccgcatattcatgttcgagaacgttgtctgatcacacccacgtcaaccccgccttggaccggagacacctcttggcgaatgccatcctatcaaaaggatattttttgcatccgctcgtcgtgttccattcgtattgagccgtctccaataccctagccgtgtactcgggatcaccattgtttcgaggagcgggatcgtccaccgcgtggcacttcaattcggtctggtcctataatcggggacgtcgtcccggtagtgaatagggtcagacaagccggacaagggattcgagaccggtggggtgcagatcgagtctgtcggcaaggatcgcctcgaccgagatctcgcttggggcttggggcatacaggggcgggggccagtcgctcacctgaaattgataggctctgcgcacatcgtcgaaatccttcaacggcacgcttctcttgacccatgctccttccaggtattccttttcagagcaatagcctgcccccttctgcttgaccgctttggaagcgggcgaaggtgtaaagtgtgatgaccattgctgctggtcgcgctgattccggacgtccaacccggacctgccggattgcgccttgtcgattcgtttattccgaatctcggtaaagagaagataagccgaggtacaccagatcaagatccataggaggcgccttctctgtcggatcagctttttgagcaggcccatcgcaacgtcgtcgtgaatcgcggataacagtcgagagatgaggtgccagtcagctttatgcgagattgcggatacgtccgagaagatccaacagggtctgtgtgggggggagcttcaactaagtcttgatcgactcactgtactcagcggattatagttcatcatggttgacgtttgagggtttcgtcaatctgagccaaggtgcattcgaggctagacgacttgagctagcacgattcgtatgacgggatcatgtgttctcccaacacctgtcgatcgactggatctcctgaatatgcatcacgtaccaattcgatgataaagacaacgacgacgagagaaagaggctggtcttgggacgactcgcggactcgtctgcgagctacccaatctttgtgtatcgacgacggggaggggggagtcatcggacgtggtcatgatgcatctctcattacaatgatgcgcacggtggtgatgaagtgctagtaggatttacgtgatcgctgactgattcaggtaccgggacctaaagtttcagataattctaagcgatcaggaagtttgggtagggcgaggtgcagcagcagggtagtagcccaacatgcggccggcgcctcggtgattctttccgtgagcggctgtggaacccgagtcgattcctagatgaaaagccgcttggggtcccggtcaacggtaacgccgggggggctggtcaagacgttgcaactcgtctgattcaacggacatcggtcgtcgacctcggatcggggaacatacttcacacagacgtcgctatacgaatcgtttcgaccctctcggccagtcgtcgatcgagacggaggacgacgtttgcctgatcttgcgtatatcatctaccaggccgatcacgacccctaaacgaaccacaccccatcatcgcccaagtgatcatgggcctactacccacatcgtcacaagcaaacaaaccgcaatccaggctaacccgacgttcttcctcgccgccaccctcaaactcgacgtcgacgtcgactttgaactcgtccggccggagccttgccagaagatttcctgctcaaatgcgttctttgcccagaggcaccctgaacgctgtcaaacgtggtctcgtcgtcctgctcacctttctcgtgatcaacctgtactggaccggacattcaacgtcctcgtccacatcgaccgtctttcgtgcaggttcagacggaccgggggagcttccgtatcctttacctcgtactcgtctcttgcgaggtaaagtccccataacccaggttctcagccatgcgcctggcttcaccgtcttcaaggacgtctactaccagcgaggccgatacatcatcgtcaccgactctcctcacgagatcccttcccacctcgaccagatcgcctacatcgagggtcgtcccgacaacgtccccgagcccatcgagttgatcgaagtcagacggccacctatcatgaacaacatgccgaccgatagggatcattacattacgccggaatccgcattgaggaggtttgacccggccaatatcgaggtcatcgccggaatctcggtaagagcagagcttccatcatgcctcttggttagcttcgagtctgacaatcttgctccaccgcaaatccttgttttggcagtttgtcaacaacgacaagaagtgtgagtcttttggtggtagcccgtctcgtccgacctcggtgatcgatctcatatactgaccggcgaaattgttcctatcgacccggacaatccagtcgtcaatcattgtgagtccaccgtcccggcctctccggcctcgttccgtgctgatccgtccccctctggctccttttcgtcactcgttcagtttaccattggatcggcgagagcttcctcggcgggtggagagcctgggataatctcttttacaagcacggtgtcgatctgcccgttcccgatcccgaccgtttcatctttatcaacgtggacgatcacatgttcgacttcgaggacctgtcgacttgggaaggcggttggagagataggcaagggttgaatttgtggtacaccaacaagctgttgtgagtgcttgtcgaccgataccgagctttcccggtcaggggtcgtcagcggtgaccgagctgacctcgaaacgtcggcgccagtccgaacgccgtgatcgagacgacggaagaatgggaggatcgtacgaacagcgacaatatctatcgattcgagacgctcatcctcgccgatcggttcggcggtcaccagggggtcgcttcctccttcaaaccatggggcgatgcactccgtctggacgtgcacaatctatggctcaacccactccgtcaacgattactgggggattacaagggcaaggtcccggtcggaaccaccaagactggagcacccaagaccaaattaccggtcatcacgtacattactcgtcaacaaaccacgaggagactcgacgacgagggccatgacggcctgatgcgagagttggatatgatcagaaaagaaggcttggccgaggtcaacgtggagatgtttgaagaacgatcggtacaggaccagatcgccatcatgggcaggacatcggtgagagacattgctaccacgctcgatcaaaacacgctttcaccgacgattggatggcttattgtcgaggtccatctcttgtagatcttgataagcgttcacgggaacggactgacaaacgccctatggatgaacccgggtccacacagcggggtaatcgagttccagcccgagggttgtcgttttgtgagtctcgatatacaggacgacacgtcaaacatcgtcattgattggttggaaaccatttagaacgacttcggcccactcgccgaagccaacgggatccctcattggatcgtcaatgtggatacgtgagtcccttaaaacgttgtctgcctggcagcgaccgtgactgacccgtacctctcgattttaccgcccacatctcagcatgtgcgccccggcggaatgcggtgttcgaggatgccgacatccagactttcccgacgtcaacagcgacaagatcgggctcgactcgaatttcgtagcaaagcagatccggtccatattgacgacgggtaaacccaattacaccccgcccactccgcattcgctatgaatagtctcgtcatagatgcctagctagggcctagccccggccgattcccttcatgtagattataggttactgaacatgaacaaagctcatgtgttcgcttcatcgatagatccggaccagcgtggtaatgcaccagacgtcgacaatcatgaacaacagtgccgccgaccagagcggtaaaaagacgtttaccgccagaaactcgagccggtaagcgatagatagccagagcgcctgttgtctcaaagccgacgggcaagacgtcagcgatgcgagtcgggattccgcgcctcaaagtactcgcctgagccccgatccagcctccaagcagccctgccacacgtgcccgtgtgaggtcaagacggggtatgatgacgggcagaaagaagaggtaccacaaaaagtactgtcgaccgattcgatcaaccctgggccgactgcgaatcgtcacttctcaaggtcaaactcacttgcgatgtgcagaccttgttgaatgtgacaaagatgatcgtctgaatgaagcaagcgaattcgagatcgtagcgccaagctattacgaacccggcggatatggtcgccagcatctgcggtataaacgacgagatcggatgtcgagcgatgaccaggatggggtccatgagagacgatggctcgctggccaaagagacacccgcgaacatggcctgatagattggataaaagtagggtgaaaaattgtgtcgatgatcgagccttccgacatggtagagataggtatgctcgaggaaaggctgaccccatctgaggtggggcaggtcggagcatcagcggtgggccctagcactcccttttgaaatggcgcatgacttacatggcgaagcatgcagcaccgaggcctacaaacgttcctgcgctcatgagagcaaaccggatctggctccaggtgatcagtctgcccttgtcggccttgagcaattcgacgaggatcggagcgccatagatgatgggatagaccttccaatgcacgctcaacgcccacaacgccgcggcccgagcgagacgcctcgttttcaagcagacgagcgacatgaggaccatggcgatcaatagcgactcggatgatccccgcgtgttgatgttgagtatcatcgggttgagcgtccagatgagatggaccaggtgaggaggggcatggatgggtggaagcagcagtagcggcgggatgacgaacgacgagacgaaagagaacaagagcttgccagaaaaggcgccgagcgggtccggtaggatccagatgggtgatagaatcgcggctagcagtggggtataccgataggtcgacctggcgtacgggctggcgggtcgggtaacatgagcgtccgagctattttgaaaccacgacccagatagactcactcgccgatgacgcccccgaaccatcgattaacaggcccgctagccatgccgttctcgccctgcccacatctggtccacaagcatcgcacggcgtcgctaaatactcgatagtcgatatcggtatacttgacgcccgagtaccggtcttggtactcgccgaacgcgatcaagccgagctgtacgacgaatgatatggggatggcgtggtcgatcgccatgcggtagatacgacgtgatgccgcggtcaagtctgagccacgatgccgacctgcgacgccaacaccgacgatcccggcagcagtgagcattgcgactcgattcccggcactggaaagaaaggacaaaggggggaaagggccgggtcaacgatcgattccaatcatccatcacatgacgtgttcgtttcaaggtcgttacaaccaaaagatcatccattacaacccgcgggatacgagacgacctactccttgctcttctcttctccctctctccgcccgtgatcgtgcccgtcccctctcaagaactgtgccacctcttccaactcgtcggcattgatccaatccgctccgagcgccttgagccgtctccacatcctccacctgaccctccttggccaactgacgaccccccaccatctggcttcgatccccttggagtgtgcgagtttgatatgcgcagcgacgctcgacatgatcgcgctcggattcaaggccgccgtggggtaaggtatgttgtccaacgtctgagaggcgaacggtacgacccacgccgccgtctctgccacgtaggcttggagtgggaatttccccgaagcgacgggcgcaaacgtcgggtgccaatcgagcatctcgaggtcccccgagcccgggtccgtgtagacgatcggtctatcgagtgccaacaacggtgcgtcgataaagatatccctgggatcgtgttcgagtaccctgaggatgggcgtgtcccccgtgccgatgatggtcaacggtcctatcgacattttaccccgggtgatcggggtggaagaggattccctggtaaacgtcgtcaagtagcctctttgccggaagggttcgagcgccttgacgaggtagggccacatgatttccgctgccaccgcgttgtgtttctaccgtcgcaatacggggtcgtcagtaacaagtcggataccgaggcggggacgatggcatgtgactgaccacgtcgatgtagaacaacaaggtctgatccttgacccctcgatcggtgtagatgccgttccaatcccaagatttatcgcctactacacctctatgattcgctcgtgaggctgatcccacgtccggaccttgcgccgcggtgtcgtcgggtcccttgccctcgttcaacctctccaagatctcccagatggggtccaagtagaccctcttcaacgtgttttcccttcggaggtccagcggggtatgtccgacatagaggacgggctcctcgatctgcctctgagcttgatcgtcataggccggtgcgtcgggaagaggccgggattggggtttcccatggtcgaaccaggaaggtttgacgagccaggtatcggcttccatcgaggcgagtcccagtcgataggccagggtctgtcccggattcagtcgattttggtcagctcgggcaagtggacgtgtcgaggtgtctcctgggggagcggcaacgacggtgacgacgactggccactcacaaagggttccttttgcatctcgtcattgtgactattggcaaacacgatccccctctgttcattcctgccatcctcgtccccactgataccggcatgagtgtgtgtcaagacgccatcctcttgctcgttcaagatcctctgtacggcctggtccaacccagcatccttgacctcggtatcgatccccttcaggcgtgtctgatcgggtgagaatgggagttgatcgcgtctgtccgggaggatggacatggtggccagcgacgagtgcgagtagatcaagagcaagacgatgcactggactaggttgtacatccagctcagatcggtcgttgtagtcagtagtgaaagcaacgatgcctatagctgtggtgtcgagtgaacgagtagatgaaaggtgattgagactttccttgatcgatgtattttgacttttgaatgacgcgcttcgtcatcaaaagacaactttggaccaagacgacatcgactatcgacgaccaggctatcgatgttcacggtcattcccaccatgataccggcacaccagacacaaatcgaaggacaacgagtcatacgtcgtccaccctcgaaaccgcactccagacaccttgacccggaatggcagacgcgacccgtcttttcaacacctcgagggcaggcaattcacattcgttcaatcgctcattttcatccttcgacaacaacgaaaaacgctctagcagacttgtcttgacgtctttggctacgtcgctcagggagagttcttgacaaactcgatacccttggcaatgttcttcttcaagctattgggtggggaacggaaaaacatggtcagatctcttgtcgactcggtttgttgcagcacgacgaggcggtcgactcactcggggagacaagcggcgaggagctcttcctcctcggcagagagggaaccgacggcgtgaatcttctcgactcccgaggtctacaaacgggtcgacgtgcccaacatcgcaaaaactcgggtcagccttccgatcggcatgaggggtggtgtggaccagcccggatcgcgcgacactcacgcccaactcgacgttgctcgaaaagtactcgataccctggtcctcgtacaaggggctcttgacgaaagtaggggtgacgacacccttttcaccgttcattcctcggatgaccgagttggcgaacaaggcaccggctgtgggggcacgaacgatgtcagtattaagccggttggcgcgttacgctcgagttccccgggaagactcaccgtaagccatggagagggtggcggaaccggcaccggccttggcctggacgacctctaccgaacgacaaccacgcacgcaccacaccgacgacaaccaacacatccatcagctcatcgtcgtcccactaccccgcgcggatcgaccgatcggacgtcgtcatcccccgagactcaccgtcaccaccaaactggatcctcttgacgagagccttgtaggcctcgccggtgactcccttggcgaccgaggtctgggaaaggaggggaacgatggtaacacccgagtgtcctccactacgggtcgagtcgataatcggagaatccggggtcgtgtcagcttctgatcctcggacgacacgccaggccggtcgaacatgctcacacgacggtaacgttggtatccttgggttcggtaccctggacggtgctcaaaaaggtgctagacctgacgacgtccaaggtggtaacaccgaacaacctcttggggtcgaacacgccgtgcttcttgaggacctcggcaaagatggggacggtcgagttgacggggttggagatgatcaggaccatggccgagggagcgtgctcggcggtggccttggccaagtctcggacgatcgaggcgttggtgttctatgcgggcgcgcgtggggattaggcatcggttggcacgatcggtggtgtgcaagggtaggagaagagtagagtagatgagcgtctagtttatgatcatgtggtttgcgagagagatcggcggtcgacactcacgaaaaggtcatcacggctgtctcgacgaggcatccgggttcaaattcaaaagtagccggttggtggttgggccgtcagcgcgaggccgtgcgtggttggtggaaacacaccatcgaggtactcacgtcataccgggcttcctggggacaccggcggggatgacgacgacctcggcaccagcgagagccgaagcgaggctacgaatgatcatgagaattagcgatcagtacgagtttagattgacgcgcccagggtgatggggggaaaagacgaaacccccgaccccccagcccctcgcacactcactcggcctgctcgtaacccttggtgacggcgggggtgttgacgtggctgatatcagcagcgacaccgggagcacccctgatatcgtacaagctcaatccggtgaccaaggggtcggtcttgagcaacaagctcaagggttgaccgatcccaccgccggcaccgaggacggcgaccttgcgctcggctcgggcggacgaggagaaggatcggacggaagtcttgagagcggatcgggcgaacattttggggaggagattaggcaagtgtgagtttctgcttgagagggaaagaggaagacagagagagatggtgtgggtgtctgttgtaataataatagtcgatctcgatggggtgtcgtggggagtcgctggggtgacggaagtggtcgacggcgggtacttttcgggggaaaacgcgtgagaaacagagaagcaagagggggagaggaaccgggaaaaccccccgaagacgacgtttcatctgggtgagtaccctggatgataggtatagagtcgagcggtcttcgaatgcttaagccaatcattccctgcatagcatatagtcagcagatcttgttagcttttcaatgacgtgccaagctgttgagctgccagccggcccgattgcaccatacattctctaaagtgaaacaagcgcgtagcccaactcctttgtatcgcgacgtctcctacacagatcagctgatcgcttttcatccattgtaccgtcagcagtttattaattcgacagagctttctcgcgtatataggtaccagttgaaaggctgctcaagctcgcctgtcatttgcacgcactctaccttttcaatccatcccccccgcgcgcttcgcgttgagaacgtcaacttcaagagcggattatcctccatttagttatgagtacagcgtcttccgacacgccttctgacacatcccaaattgtgcctggtcaagacgcctcaaccagtaaggacaatatgggtaacaagagttggcgcatggttgtgggggaattcgatacgaagccgggaagaccccatttcagcaactgggcggaaccgaagacattggtagatctgactgatcggattgtcggcgaccttgaatatcacctgcatgcactcaagaatttctaccggaaccaggctgaaaacgggcgaaacaaagtagctgggatgttctacgaccgagattgggagaaggctttaggaacggaagtggatatggtggagaagaggctcacacaggacttggaagagaccgctctccaatatggttggactccccatgaaatcagtctaactcaaagtgactcggaagagaaacggtcgtattgtatcgctgtagaaattaggcagggggacggggagacacagcctcaaggcttcatctcctgtcgatcgactttcgatttccggaaggattacgagtccggggctggggatgatggtacggcgagtttctggatcatttctcctttttgcaacgagcgactaactgtctcacaccacagcgacgttgaccattggcacggatgaacatcgcaagatgattttagaggcaggtaggcgttttgtcacctcagatgttagcgtgagagatttctcggagatgggtgaaaatacgacggcgcaagcaagttcagcatcagctcacacagaactcaccttgaccgacaggtctcttggccccggttcgacgaggaattcccggagcgtcactttcatgccatacgcttgaactcaacagaaatgtgtacgactgccatgtaacttgaatatcgttttgctgcagatttgaagttatacaaagctttatgggttttttgatggattcctacacgtgagaaagcggatcgatgacagattctccccaaagaggactactcgggaatacaggctagacgcctggtcgataagaaatgcattccattgaattgcggacatcctttcatggaggatcacgaagagcgccagcactgcctcgctgccaccccagataggacaaagagatgaatatgtatgtataccgacgataccgtgtggtgcgtgtttcgtagggtacttttcccaaactgatcaagttggccctactgttcgcggtatacaaaaactgtggtaatcagttgaattaacctaaataatacagcatactgccatattcggaattgggagtgacgaaccactcacaatcaaagaactcaggtgaacctcaccagacccacccctaacaaagcctggactgactaagcgttcacaagaaacgatggggggcgacaagttgatgtgtgtgaaggtttgtggttttgggcaagacgtcgcagtcgaggcaactagcttggacactttgtttccccaatgtgaaatcagcctaatctgggcccctctcatcaaggcctttgaagccgtcgctcgctcttgcgtagctttcggatgctcaactatcaaggcgcagtacgatgggaaatacgaactctcaaattggccgtcatttcacagagattgcaagaagtatttcgaggaaaagattgatcatgcccgcttctccggaaatatcgagcgtttggctggagtgatcaacgataattggaaccaacatgagacgatcaacgattctcctgtgctcaatgtcgactcccgctccagtggtgtccttggcctcgccctcgccttggactccaagggctatcctgcaccgccatcgtgactgccacgattgagctgtacgtcgactacgatttcaaaacaagcgtctacctgactccataagctctcaaagctactggtaccgtgaacttcacccgcagaggtaacgacggtacggatgggtggtccatcgcctcctccgagaactctgggaccgcagactgcggaacgtcgccggatgattctaccatgccgcccgagtatcaggcgttgacagcggctgccccggtacagtcccagtctgacggtagtgaaaacgatgagaaattttctgttagcattgtgtaatgtgtagagtatgaagccgaacacttatatggacatgccgtcgatatgacgaagcagcgatgcagtcaattcttttctagggtcaacatctatcagtcgggattcagcgtcatcttggtcggcgggaaatcaagcaaatgaatcagcctgataattccgccgtactcctccacgagaccgtctctgctcgtcacttcgccatcatttcaagagctagggcagagtgatcgttttacgacgaccacgtaatgttcaaactgatcaccgcatatgaggtctttagaaagttcgtctcacgacgctccttggattaggtaagcggtcggagcatgactagtcgcagacggctcaattggtatatagcttgaatttgatctgtccatcgcattgcaacattagatcgcatgggttacttggttggaagaattgatctctcggtagcgacacagaccataaagtcgcatgtcagaccagagatattcacataagcgctgaccaagctgctagtccgatcgttcgacccaacttttccagcgactttcctcagcaagggaactcaatctttcgagtctgactgaaggctcgatatttagccaacaatgtcattcatgacacgccgcacggggcaatttctggtcacacagctcgaaccttgagcacaaagactgcaatggatgcaactcttttcagtggaattgagtccggggtgtcaggtagcgggctttggacaaaatcgattgccaacagtcagagtggcctcagcgtctcgctaggttgtgtatcttagccgttcagctgctggaatcgggccatcgggtcgatgtccgaaagcggtcctataataagtgttgattgttaatttgacccgcgtatgtcgaatatacagccttccagccctattgatcgttgcaggagaccgactcagctaaggaactcgcgaacaggcgatatgttgcaagtgtagattgagaatctctgctctctttcacagcgcaaacgatactttgaggaagtccaaaggacatccaatgtagtattcgggttagcagtaggacaaaccaacacggcccgcaccttgaccagatacgggccgaggcgtgtcgtgtcgaatctagatcgcatgttgagaagtatcttgacaaactgagacgggtcatacggcggcaagtttcggtcgtcagtactcttggagggtcacgcgatcacagcattccttgttggcagtcgatcgggtgtctgagattgctcgtcctttgtctaacacctgtacgtcactttcctgatgggagccatgcatacatcatgccatcgatggtgaagtagccttgattaagaaattaattcaccgacggcccgcgccccataccaagcctcctttcgattacgtcatgtactcgagtagtctagtggtcccctcgtgcccccttgcgctctctcgtttgcaattcgcacatcctttgtcccatcttctccggtcatttgatccttaggtatcgcgaacgtctcgcacagctataagactggaccaaaacccgctcgcatctctagatattttcagtagctgagtgggtcccaccctttggcgacgctactcaaagcctcaaagccgcgtcaacctgcatctcacaatccgagccgccagccgaacaagcataacatgatgagaactggtgccagtacgtgccaatatgttgatcagacgatgttatatgcggctgagaaaggtgcatgtctttctagcgccaaaagaacccgtattcaagctgagtacgcagaaccactcttgtaacccgaacctcgattatatgccccggccagggctgacgttcgattggtcgaagtgggccgatttttgggagatacttagcgagaaactcagactcgcccagctgagaatgataaatatttacggagtcaacatcaattttcgtggtagcgatcgcagaggattgctcacaactgaatccaagtggaatgaacgacgagctgccggaatggaaggatggaaggcatatctggaagagggcgtcacagaagcgagcgaagtcatcggtacggacccctggctaataattcaggcgatacttgatgattcaagctctctggatcatgctaaaatcaaggctggctaccaggtgacaatttgtgaactccttgtcgagggttggcccacctcgacttatgagatctcccatatctacgaatgcgacctggtaagggagctcagggtatcctcgaggcaaatggttgcgggcttgcctgacggtccttccttcgggacgtcagggaaatcggacagtggcatgaccggaggaacttcgctacaaatgaccgaacggacagagaacggcaattcctcgatgctgtccggtacgagcacacccaataagccgacggattccttattcgaccttgagccttcttatgagaagccggggtcagcgcagtcattgcgctagatagctcttcatgataagcagatcagcgacaaactatgctaatcctcgatatggatagctgcagaatctataaatttgccttgcgataacaagacctgaacccgaagggaacaatgcccatatccgcctatttgatacaattttataatgtttaccgtgattgcctcacataaacgtgtccgcgacaagcctgacccttaacttcgctgctacccattcatacacagtgagctgccttcatgatagagccttggatcgtcgctcatgtttcacgcggagccattgaggccatggctttcctagcaaaccctcgtgatcatagacgcatggttgcaaactttacaatcgctgggctgatcgagttggagtttagcggaagcgaaacccgcgaatacgaacgtgattgctctatgaaccggcagaggcagagccaccggtcctcatgcagagctatcagtgattcacagggctcctttcatgtgcttctcgcttatgatggttttgaaagtccgcaatgtaggcgagcgacatcatcgtttacatatagaaaatgatcaaatgcatattgccgtcttcatgagttgtcagttgtgttcttacgaggggatgaaacgaatcgcaaatcaaggaagcgcccaagtcactcttttggatgcaaaagactcctgggcgtcgttttgagttggtcggagagagtccttcgatgttctcgcgtgacgcccagcgatgcctgcgagatcccggctgtcgccttcttggcgttgctacatcaatctgtctcaccatcgtacgattactatcgctcatccatctcaatgagactggattccgacggctacacctctgaccacgagagcagctcatgccctattcagacgcgaatcacaaaggagaggaaatccgatacaattgttgagtcggtgtgagcagcggtgtgaagtggagtaatcttgatgacatgatacgcaatagcttcttcaatgtacatcgcacgatatttggccacctgtatccctagcgtgctgttagtaggatgattggcaatctcgttcacgtgcatgaaaagacactcttttcatcgtgtgactctctacatcagccgacagcaatgtcatgagccctcaacgacgtgatcgctctcgtcatgaccgacccttggagaattcttcggaccctctcctttcatctgctcgcctggaaagtacgaccctggtccacatgtgagcttgactgcgatcaacataaatagcggtacatactcgctgtcctacagatcctgtcgttcaatcatcctgacctaagcattcgacctttcccttctacgaacgagtcaccctagtctaagatggcttccgaggttgaaaacttgaacaagtgggtaatcgagcatgccgaaattataaagcatgacggaattcattggagcggcaattgggaccaggtgccgatctcgcccgacatcaaagagaattggagaaattacattggaacacttgtgggacggaggttggattatgcatcgacttgcatacgctcggcagaaacgagacgagcccatcgtttggcttcagacgcggtcgcttactggaacacgcgtgtcaaacaggacttgaccgatgaaagtcagaatcatcgagcgaccctggaggaggcctccggaacaaaacttgacgacatcgccgatcacattggctttgcgaacatgtacttttgccgtgaaaaaccgggatcggattcgtctacggagaccagtttcgatgtagtggtggtgggattgctcatgatacagatagaacagggcggagagctctacagagtaccaatcatgggaatcgccaccatcgactggtccaatcctatgcccgaggttccagaaggctcactggaaactgggggtcccagtgacggtcctatccagagcgattgggcgacgtctggtcagaatactggtggaatgatatcgaaccccaccggccaaggaagctttcaggcagccactgccttgacgcagggaactgagccctcttcggagtggtcggcccctttcagtattgatgatttggccacaatcaacctcaacggcatacagtggggtgcggggccaccttccgatgcgggtagtgatcaaatgatccaatgaccagcctccccgtagcatcaggtaccgagagtttttgccttcatgcttatattcatattcccgctgaacgcttttttggattcaatcagtacaagaagcacagatattattcattgcgtatccaatatcggattccgtgtttccaatgaccatccggtaacctagtcgatcgattcatcgtgaaatcttacggacgctttacccctggagggacacgatgttgtcgtgactttcaagaccagactcactttcacgcggtccatgagctttgaccacaatgtgtttggcctcacgcacaatatgctgccgagccgaagattcgttacatgttgatcgattcgcctctggaccagacccggatcgtccctgtttccggttcgccccccggagcccccatcatccaacattttcaactatcgtggctggcaagtcgtcaggtcgtcagcaagttgtgataaacatctgaaaggcgcatcatgagagcttgtattctgggcagttgtgaacatcttgcctgggtcgtttaaatgatgcatgtgtcggttgatctcaagtagaatttgggggatctggtcgagtacaatcgccgaagacgccaatgtaccatcgctctacatcagagctcactcgacatcgaccaaaaacctcttgacctctcccctcgcatcggtactggcccctagacccagccccaaccccctccccctccccctcccccttgtctccttcacccgcgcgcagccttggcgatcttccgtcgaaagctcgcaatagagacagagacagagacagagccagagagagaagtgttacgagcagccatctcgcgatctctgaacccttttccgactctccgtacctcgcaagaaacggggtccggcaaccgatatcccatgcgggtcatacagtcaggacatgctcgagagatcagattggcttcccatgtctcgactcaagaattccctttctctagccttcaaaccggtacgaggaatggctccggctataggtggctgcctctcaagcgtgtcatctgtctctccagacacctcgcatcgagtttcagctccgaaggccatgttcccgtcgtcaccatctcattccttccagaagtttgtcgcccaagactatatacaagcgaatttgcgattctatgcaaagatgccaacagccggtcgggcggcgatacttgcgagctacagtaccagggtcgcgccagaaggcatcttcggcggttccctaggcgcatatgagcacggcaaagccgccattacggattgatccactgatcagtagccagtgaccggtgatgtaacgatactgctacggcgctgtgtagacaccgtttcgtttcgcgtcccctctctgcaactctcttaatggatcgaccggcggtcactgtgcctcccatttccaaccatgcatccttaatcccgagcccctcgcgctcatcctccaaccccctgacccaaagtcccagtgatgatggagttgagagccaattgtgttcatccgggacgtcttgcgtatgcctgttgatctccctggatagtagattgtagggaattggccgttccaaaacttaagagagtgacattgattatatgtcgagaaacctcgttatctcctcgctcagatgagaggtagaggggttggcttaatcatccatgccaacctaaaagacgacgatctgttccgttacgaagaaagacgaagactggctgccggggatcggggcgtgacttggacgtctttgaggtcatacccagaaacgcgagtatggccaggaaattcgtattcgtagtagccatcgaaggcgctccgaccgtgttggcatcggcaatgtccagtataagccagggaaatgagatgaacgtattgcgatctccgaggtggagtgtcgatgctattgggtccttcaatcgttagatcgtgcctggacccgcgatgcggtcggtatgattgcgatctgacagaatgtctaactgtgaaccatatcatcgttgctcattgtgagggagcaatacaggggatcaagacggcccagataggattctcagtgcactcgaaagtagtgggttcgtaggtcaaataggacagtttcacatcaaggtatctatcatccgattctgggcgcccttgtcccgctcacgctaggcggggcgcaacaagcaaaaaattctcatcgcaaaacaaaaagttatggagaaatggcgaatcgaacgccagacctttccaagataagctagatatgctaatggaatgttataccaactaaaccatatccccattgatgttgggcatttttgtatgaaaaatataagcatttttgtagccatactctcggtctcgtccgttgctttttccccttgaccctctgctaggtgaaacttctcaggaaaatattacacatcaacccttcaagattctccctcatacaccattccccccttacgttgtcaacagcatccaaacgtcatgtccaagagtaagaaacaagcagccaagctcaaagctcatcgactccaagtcgcagctcaaccggtcaagacggtcgtctcttccgtcgttgacaaggaggcgggcgacgagcttgtcgctcaagaagatctggccatcaccgtcgagaccttgtctgccatcttggaagaaccagaggttctcagtgggccaaggtacaaggaactgaaacgggtcggatgggaattcggcaagacgttggctgagcagggatcaggcgccggtaggttagggacggagcgagcgagggaagatatttggtacaacccgaaatgcaggacccgctgaccgggatatatgttcgcgacaacaggtacttcgatccactcgaaaatctcccacctcttgtccttgtcgctgtacaagcaggccctagttctccttttcgacctgtatgtcaatcgcacgcccaccaagttgggttcattgcagcgatgggtgcgggactgtgatgccaccagcaggcccggcaaggtcctcggacccgaagaggccgaggagagaaacgtcgtccttaaatgcctcgacatggtactccgggtatgcggtggcgaacaaaccagcggcaaaggcaaggagcggctcgaagaggagctcgatcaggagcaagaagagaattcggtcatcaggcgaatgaaggtctggagcgtcagacaggaaatcgatcaagccttgggggaccatgagccacggagcacattacaagcggagaagccgctctgggacttgatccagaagggctcggagagtgagtcgagagcaggtctcagtcatccagtcagactctaatcgctgcccgttcccagacgacactaggggtactttgccctctttctacgctgtacagaccactccgggtcacctccgtcgtccacccaacgtctacgcatcgacggttcaagcctcaaaaaccccttcgcctatcccgtttccggcctgctccgcatccgccttttccatgtcacatccggcgatccctacgtgctcgatgttgctcaatatcctgcctccgaccacgtgcgaatcgatcatcgacatggccaatacgctgggatgggagccagatcaagccgcgggaggctcagcggtggacaagacgagcgtcctcgcgcacaatgtcgtatggctcgcagacgaagagtttgtcggccagctgtttgagcgaatcaagccgtttgtcgagcagaccgtaaaggggagcggagaaaagggtgatggaagcggtggaagggttcgtgggatcaacaggaggtttagggtgtatcgttacggtcccaagcaggtgtatagggtgagtcagcctaggttcgcctatcgtcggacaagcgtggtttaacatcggattgcataacggtagccccacatcgacggtgcttggcccgctgcaggaacagacgtcgagactggggaatatcttcacgagtgagtcgtgaggcttctgatcgaattatcaactctggaattgatcggcggacgtcggccttgcagctcgtcaccggcggatgatccgttgtggtccaggtatacgctcttgatctatctcaactcggacatcaactcgtcttcggcggcaccgaccgtaccaggcgcgacgacctttttccttccttccccctcgtccatcggcacgttgctcgcctgtcctatcgctccggtccagggcgctgtactcgtcttcccacacggggacgcccgtgggtcgttgcttcacgaaggcagtccggtgggggacaacggttggaaggtcgtcatccggaccgacctcttgtacgaggccgaagggttcggcgagtttgctccgggcaagaagagaaaattggtctcggagggtcaggacgacggtggggtcagcaagatggccaagattgtcgagggggagcgggtcgttggcgaggtcgtggtgcccaaggctgtcggcacccagcatgctggcgacggcgtcgagggcatcggaggttgatcgagcaggagccgtgggatttgcaatgtatccagtacgtcctgtacttatatgtatgtatacccagaccgcccttctctctgttttacgaccataccttgcattcgactatgcagtccatcggctacctgttgtacatgatcatatttttacttccgaagaataattttgattccgagacagttcaggacgcaaaaagaggtcgaccccaacgtcactttgggattactctaccggtctacagcacgttcggtctattacacgctgcatgctcatagaatcaggttgatccggacaaggttgcaagactacaccgtcgatcgtctgatctgctttgcggtgctgcgacaaatctcacagacctcgcagtcgggcagactcgatcggtgccggccagtcagccagacacgagtaggagtgtagtgaatctttgggtcggcgtttgacttgtcttggctttgaaattcgacttggccgagctgacaagctacggcacacacacacacacacacaccgtcacccaccctgcgaaagccacctatacgtcgtcaaagcgtcgtcttaccttgctacgacgttcacctagactcggtcggccatgaaccaagacgaggtcggccacaaccccctcgcatccttttcgtcggtcccatcatctggctcgtccgtatggatattaccctcgccccaggaatccgacacatctaatcggtccacgcggtacctcgccgctcctgaagcgaggacaaacgagcagcttcaaccaggaggcttacctaggacgccaagtagggcgagtacggcttcgtcagtcgcctcagctcaagttttcgtaggagacgcgacgacgacgacggacgatagtagcatgatgatcatgccggacgatgccatcgagacgggggatttccgttaccccaccccggacactttcggtcagtcgtgcgagggtctttttttgtgttgtgctccttgccctcgcactgacatgcagccaatcatgcgtacgtgcgtcaacaggcccgcaatactgggaacgacggcgagagctctggctagccggacaactctatccgaacgatccgacccaacctccggtgaaaccgtactctgggtcgaacaacctcccttggatatccccagaagctgccaacgggacgacgagctcgcatacctcgttgtcgcagtacctaggactctcgctcaaggcgaggggcaaactcccttcgttcctcgtcaacgcgttgcctcattcctcgtcgtcatcagcatcgaacacagccacacagctccctgaatcgacgacgacgacgcccaccaactcgacccaacctcatgcgcaggaccacacctcgggaggaccggtcatacccgccaacccatcttctctggcgcaagaccgagcgggcgccgcacaaggtcagggtcaaccaatgtcatacggtcactaccaggccgctcgtgcgtccccctggactcagaagaagggaggggacgacccgatcgatcgactggaggccctgctggctgagccaggggcggaagagtcggacagggcgtggaaacaaggaggtttggaggccgtatggaggttcttgatcgacggcaagacgctcaagaggggtatccggttgggtctcgctgtgagttgggagacggtcctaggagacgatcaaagacgacgtcgcgtggagagacgagcggacgtttcgctgataaatgacctcgaaccatgtgtgacaggtcaagatcctgcgagccggttggatccacgatggcacgtggcccgcgacgtatacgatgtcaggagggtctcgctcccaattggaatccctgaataacgatccattctttgccagtcctccccgagtgaacacgtcgttgcctcgcacggacatgcgggtaaacacgggacccgagccgatcgatatccctcagacgacggacccgggggtgtcgaacggggcatgtccatcggatcaacaaggtgtacggaacaaggactttgtatcataacaagcacgtcggcgtcgaggtataatcatattcccatgcatgcgcgcatgtcgacaccaccgccgaggactagcaggcgaatggtggatatggacagagagaatgaattgacctcgacttgttatgacctgtcctactgatggaaacttttggttcctaagacttgtcaagactacactactcaccatcgtcacggtgcgtttatggccatgggttgtacaataatatggtttttcctctggaaagccccgttgcagcaagcaatacacctagacacactaggtcttctactgtttgttctacccagaacggcagaacatcaacataggcctgatggtgggattgagatctacgtatctccaccgaggcttgttgtcccataggatatcatcttgggtagccagtagaattcccgtctgaacactctgacatgctgatatgtcaagatgatgtcatagtatagtaccgatcatgctctgtggacggcatagccaacagagttgagatcggacctctagcagggtgcaagagcgtccacgcaacagggatgcttggggtactgtgcggtctggacccggctgtggtctcggatggcctgacatgcatcatgaaatcatgaactcgtttgaccggaagaaaccgccacttttggttcagtgtttttttggcgatcttcttccgaaattttgcttccgatcgcgatcgaccgcctctgatgagatgctgggatgatgatgaatgtcgatctcgacttgtcaaagtcgacacaaatatgttctgacgatcaatgtcagttatcaagttgttggacatacacaactatctataagctcatcatcaacagttgaaagccgtatacgtctaatcatgcgccccaacgtcgtcaacctcgccaagtcggtctccaagcgacctctccggttgaaaaaggcttctgccgaactcttaccccctattccgcaagtcgatctcgagactgatttcggcgagcgagatcgtagctgatcgaccgatcgatggcccatgacgacacagtctgtaccgacgtttgttgcgtgctcatcgggtgcttcctgaggatatgcgattcctaggcgattcctacgtcaagacgggtgagtctggccagtctccgcctatacctccctcttcacctcacgctgaccatcctgtcgaaatctaaatagaattccgggccactcgatccacggacaacccgatccatattatcgggttcttgtcccagtggaagctctacctcgatcagctgcagcagagcaacttgaagccaggcgaggtattccagggacgggtgttgcaggaggaatactttgacaaggtgcgtaagaagtcagggcgggtagatgtgcgtgtatgttgggtgcaagatactgacgagacttgttcaatcaccgcctggaacgagtagctctcagacgagcaggctgggcagttgtacgaattcatgcacgcatccaaggatctttggaagaggcaggtttcactaccctgctcctatgactctgtcggaccgcctgcttacccggtttgctccccatctcgacgacgcgcccactctcgttccagcccggaccaactcgaagcctcggcggtggaggaagaacgtgccgaccacgaagcgaccaaacagaccctactcgccgatcccaaagccgaagctcccccctccgagatgaccgacccttaccctctacccctctcccagccctccctagcgcaggggtcggacgaggtcaagaacaacctcgatcccatgcctcaacccctggacaggacgggagaggacgaaaagaccctgagagcccggttggtataccagtgcaggaagagggggacgttggagaccgacttgatcttgagcaccttttcaaagcaatacttgaacgacatgtcggtcgcccagatgcaagagtttgacaaggcgagtctcggctggcatgttttcgccttgatgtttcgagtagggacgcagcgctgatcctgggcgagaacggacgttgccatagttgctggacgaacctgattgggacatttactactggtctgtcggcaagagggaggttcccgagaaatggagggataccgagatcctggccaggtgagaacccgctcaaagttcgtatcatccaggtcattcggctgaatcctcgttcgctaccctctgtatagactgaagaagcacgccgagaaccacggacgggtcgtaaggaccatgcctcacctgtattagcactaccccaagtaaagtagaagagtcgttacatgctaaatcaagatcgagttcaccgcgggacgagctcggtcgagtccggccagacctcaacgcaggaattcgcttcgaggcggagtttccagtaatcgagatggcctggcgtttcctacatgatcgcagcatactgagcttcttgtcttgaagagctactaacccttgagccgaatgtcgagggtattaatcaacgtcgcccctcaattgacctggccttgttgctggtagcgttgtcgtgcgacttgccctcgtccttcccatcgagtgtcagcacgctggagactttcaagatgcgcatagttcagtcatacacgtgattccatgcgcggatgtctacattgccacagagatctgctatcaagagccttgctgtctttgtatgtgaaggcagcgtgaattcgcctgatttgagcgtgtagtggaccttttctgatgccaggatgatcagtcttggtcgcgtcaagtcgttgtagcaagaagatcccggaacggtcacggttatgctacaagcgactggaaacaaggacctatcctcattattacaaaatccaaagactgcttacaaaacctggctacatgaagaacgagtgtagttcgatgagcgcgtcgttataggccgtccggtcgctgtcaaacgtcttttgacccgaagtcatgccattctgttgaccgggcaagaggctgagtcgattgctagctcgagtgtcggcgcgcacgtcgatcttgcactgaagagtcagcatatgattatactcgtcaaaagtgaactggggccctcgctcttggatgagattgatgagtgcctgcgaggagaggaagaggtcgacggtcaggaccagggctcaacggcgtgggcgaacctgggatcgcgacttgcctgtggaccgatatcgaacagttgccaatactgtcggcatcttgaaagcacgatacgagaacctcccgacaacatgtttcgaagagcttgctggattgcggcgatattccgttcaatcttcttgagacccgagtcggagacgctccgcacaaagcgtccgctagaaaccagaacggtgtcggccaaggaatcaaggccgacgaaaaggaagctgcgagacgccgttatcagaatcttgttcaacgggccactgcgcagcgtaccgactcactctcgatcctggggcggaacggcagactgcacgacactttcacactgggagagatcgttggtcaaatcctggatatgtgggtcgggctcatcatccgtattctcggcccggtagttggtctacggaatcaatgcattcaatgactgttcgcgtccatatgtacaggatcgagactgaccttgctcatcgatgactggatgtagaacatcaatcgacatcgcagctcgatacggagggtgtaaaggaccatgtcaccgaattgctcgtacgtcgacaggatcgcatcgaaccgtctgtttatgcgggtcgaaggttaggatgcaagtctattcgtaatggacttccacgaacgtggcctcactgagacattgccatggtcaaatcgagggcgggcttctcggttgcagatgtcggagacggtagatcgagctatcgagtcaacgggtcagctccggtaatcggaaaagtagcagatagagagttgccgactaaccatggcaccttcttgctcttcgccacccggagaagccaagtcctccctgactcgcttcaactctctcaggcgggcaacaatccagcgctgagaaatgtcgactgattagctttggatcgtagatcgtggatcaaccacgtcgctgtatactgaccgttgtgtgatacaggtccgccagggaagcgaacttttctttcgatccgatgatgtccttgatctcgaggcctttatgatccctaggcaataagggcaactcgagcttgctttcctgtttactcaactcttcacgagcccgcacatccgccgcctgctcgtggcattcagctgttgaacacgtgcatatgaccaaaaattgactcactgggctatgctgcaactcgccgagatttgcgaggatatcctcgcgctggctccaactggcggccaatggtaagcgtccatcggtataagagtccgaggcaacgatgtctgccaaacgagatcccgtaagtataggtgcgatgatgccttcgaaagatgatgctcacccttataatgagaattggatttctggtagtactgcacgatgatgccgataatcaaacggctatagttctcgcgctgaaaaggagtcgttgccaacatgtagcagagactgttgacaagcgccattgtctgtgttcccgactgaatttgccagaccctgacatcagtgagacgtaaaacatacacagtatcggaagagaaggacccacattgactatcgggaacgaactccatcgcgaccaatttacatctcgtaggaaagcggtcggtcctacgggagaacgtcgctgtcaattgggaaccgcatgtcatcgctttagtagacacacaccattcgcagcttcttgaaacaggttggtgaccttctcctccaattgtggcagatacaccttttggataaagtcgtccatgaagtggccaatctcaccatgctcttcgtcgagagagctcaaattgatggtttcccgcgcagacgtgacgaatgccaggtaaggctggaacaagatcgagacgttgaaggggtcgggagaaaccaagagtttgtgggtcttggcgaggcttgtaccgtcctcgttcagcttggtgacggcaagacgcgcttgaatgccgctatccgtcaaagtgaccagaccaggtacgtgtgtttgcatggcctgagtcaagctctgctcgaacttgtccagatcacggttgatagatttggtgtcagtgtcgccaaaccgaaagacagcctgggaatttcatggtttaatcactcagcgcacaacgctgctttgaaatggtcgacataccctctgtcgctctctggaggccttcccattccgcatgacgtcgttgatgctcgacacaggctttcggttcgacgctgcattgcgattcgtgtccgttaaatagtcgcgcagcagcgctcgaacctgaccgcaaaaaatagatcagatatcgccgtggggtctcgctatcgcccggctcacctctttctgcatcggcttaacgaagtcttccgtaggaatcgcagtaaaaggctgccttttcgagctatatgaactcgtctgtcccgaggtttgcggccgtcaatcgccattcgaacggacattgcctggacaaactcaccatggctatccggctgacgacctcgctgaccactctctgaccttcaagtacggctcggaactttgaatagaccgtccagaaaagatcgagcagagtatacgagtgggcttcggatccgcctcgctccaagctgtccatccgtaaacgctgatgccgtgtgaacacactcgcagccatcgctgtcaagctggcgcgtttcaacttgttgagctcgccattgatcaggatatcgccttcctcagcaatattctgcggtgctgtctccgaaccagcctctgcctttcgcaactccgccctatgaatcaagtcaataccctgcacctcacaacggagagagaacaaactgacctatcggaggcctcctcgatagtagtctcgaccaacttgaagagctcgtttgatatccgttggctgatggattccaaggcagggcctaatcgatctagaatcgccaaagcctccaggaccatcgtcatgtatgcgtacgaatcgagttcaggatttccagacacaacattctccctctcatcctgcagcgcacgatctgttgcggcggcgcttgcaggatccgtcccgtatacggagaggtcgcgcctgttcgctctgggcgggatcgctggcagattcatcaactcgtcgtcggacagattgagtaccggatccctgttcggtttgtgggagagattctgaagaaatcgtgaaagacgaggattgcttctgtccaagttgcccgcgctcaaacggcgtgcaggctcaacgtcatccgcatccttgaccggatccttgggtattggtactgtgcaccacggccttcaagatcagctcgtcatcgtagtgccgtctgtgaagcttgatacttgcggtgcgtctgacctggttgatacggcatccatcgaccatcgcaataatgggtcttgaggtagagatggttactcaactcgtctaacaggatgtccaccagcacctatgccatattctgccgtcagtccatggtcaggaatggcgtcagtcgccatgctgcttacattctgctggctgattagatacgttcgtagatctgaaagtgcaccgatttccatcatttcatccttattgatggtcttgatagctcgcgttagaattagcgacgccgcgagaaacttcttgtccgctatcaaggtctccaagcgttcggggaccgccttgaggttctcgctgtagtgaattcgagctttagcacgtgttgagcgagacgacgcagggcctcgacgctcacattgtgtcaagagttttcaacatctctcgcaatgccctttccttatgccacaaagcgaccatctccgagcgcttccccgatgaggctccggacacgctggcatccgtcctcccactcagtagctcacgaccttccactagcttcttttttgtgtctttgactactccctgtgctcggttcagtgaagtcatcaggttggcatgctgaggcagagagcctgcgtagacctggtaatgattctggacggccttcgagagcgaatccgacaacagtgactggatctccatgaaagattccaagtcctgaaaaccataaggagtggaccctttcgcatcaccctgagaggggggcagaagcgccaaagccaggctggttgaggcgaactaagcgggcgcagggccatcagatcaagcgcttcgggatagaagccacggagtagctcacgtctgggtccaggacgaacggccactctctctggatcttcctcaagacggctggagcgtgagtgtcagctttgtctcccgatccgaagcagtccttgaatctgctcacaatcgacatcgtcgaaatcccgtcctccgtgaccgatcatgagttcctcatgaaccttgaagctatcttttccctgagccttcctcattgctgacttttctggcatcttgcccttcccgacagaggagaacgcatgtacggcattctgcaacttgttctccctctctgcagtttgctgttgaacctggatcatgtgggaccgctgattccgctcactctcccagaccgttgtcgagctcggttgaggcctttggggtccgtccataggagatacgggggagaccgggagatcatagtcattattcgctggagggatctgcagtgttgattggggaatgctacgcgaagaatcgttcgcgggtatcgccgttgcggaagatgtcaacgggttgggtccaggagctggggctggtgggtccggggctcttctgacagatcttgctggtcgagcaggagcaggacctggagcaggactggctcttccggtagctgcgatgccggctcctggcaccggtgctgggcgatagttcgacttgacatcgctcaagcttcgaccagggaagcctacacatagagattcgacgtcaaacagcgctacctagcagcgcccaatgaatcaccactgaccatttgtaggctgatatggttgcggattggagatcttcaacttggtggaaggatcggatgccttcctcgacatgataaacccttggccttatcacgcctgatatgctcgaccggagggttgcgacaggcaagcgaccacgcctataatctggccaagaagattatctgtatcaatcgtgaacttgcgacatttcaagtgagattgcagatgaagccgtgccatcgaacacttgcgaaccagcttgctacttgtacggagctgctcgtaggtcatgaccgagcgggagcaaatctcgatggactcgtcacttgtcaccagccttaccgtgtccgagaccagagattcacatgatcgtaatttccgcagggaagtgtatacaacgataaataaggatgtagttacaagaggataacattctgtgcgcatagcgcttgaatcgtgacgaataatgaaatagcaagttgaacgtggccatgaccaagcgcgttgttagagccatccttcacggcctggcgtttcgctcggggtgatggcttctctttgcttgacgtgagtggggcttaattgtgatgaactgaagaatgacgagccttcaaggccggccttggaaactcgtcgcattggctgaagggtatatgtgttgacgggagctctatgcgggttggacgaggtgaggagctgcccaccatcacgccagtatgccgaggacgactcaccttcgaaattggacatattgcccatttttgcggacttctttgttcataccgcgttggtctgccatatccggcatatcctgcttgaaatcctgcgctgtcgacttattcacggctgcctgtctcggcgtggctacgccgtattcatcgatgcagtcgtctggtcccggtactggacttgacactaatgtgccatcagtggcagggccccatgctggcggtagactttcgcggccatatttgttcctcctcgactgcgagttgtctctgtcggaatcgttcgaggctttgtcttccttcgcgtcggatgcgataccggtcgatcccttgagaccgagctcgccctcttcgaattgcatcaattcagctacgaacccgatgtttggggagatgccttttcggcgttccgcgacgtaggcgtatgccgttttgagggtccaggcgtttgcatggataaggtatcccaggaccacagtgacagaacgagatttgccggctttgcagtggacataggtcggcgacgagtgcagtcgagcatcgtctatcatgttgtcaaagtgggcatatcagcgcgcaagacatggaagcacagcggcagaaacgtcgcgtacctaaaaactggcacgcatccgtgacgcctttgcgaataccgctttcctcgacgcaatcgcgcaggggcagccgcacatatttgtcgaaccgatcttgtaagcgcaaccgctctccctcgtcgcattctacggccacattgaggatcctcttgatacccaagtcaagcaatttctgaacttctgcttcgctggtgatctccgggccgagatacaggaaggatggcaggatggtcgagacggtaaaggtgagaggaccagggctacgatcttcatcatcatcatcggcagcgttgtagcggttgattggggacagagggtaatcgatgccagagctgtccgaggaggaagatgacgaacaggaaggcggaaagtagggattgcccgcagaatcgatgttactgggagaatcgtactgcgggttgactcttcgagtgatacccccaaacgagctgggagaaggtggtagcccagactgtgcatgacagactgactgcagggaagcgaagcccctggatccatcgtgcgcagccggatcagcgctcttcaacggagtgagcgttggtccgcttccaagtggcccgagcccatgaggtggaaacgtcgtgttgcccgatgccgaacgtaacctcccagacgtttcgccatacatgcccggtgaaggtgtactggcactcttcaatggcgcgggtaccgcgagattagccttcgaggtcttgaggtccagagccggtggctttcttccggtttttggtgccggattcccgacgccaaaagtatcgatgcgtatgggcgtcgggatcattctacgcggtttagacacacccatcggcgggggcgatattagcgagggataagggtcgatagcagtaaggctaccctgagcgagcgggtatggtcgtagactggccgacgggcccgtcgaacccggaatctgcagagatggcaagccgtgccgaccggtccgactcggaaccgatcgaaatgccgcctgcgttggtcccgaggtgcgaggtaccgccggaagcgaagttaaatctgccggatttctcgaaggtttctccagtgagagattaaagccttgcgatggcggtaccgagatggccggatcaaagttgataccgaagggcgtcgaagcttgaccttgccgcaagacgtcgtatagagtttcaccttgcgtggagattccctgctcccagccgcctttcaaccatttgatcccgacctgacccgtcggtcgtagatcgcagatgatctcttcaacgaccctggtgctctcctcgtccgtcttgtccgcaatcaagacgacatccaagggttcgttctgccatgccctgttccagatggcaccgccgatttcggtgctgacgaacccagacagggcttcccagccgcccgctagaatgttgccttgacccgccgcgttccttgttcgagtatccgtttggaggcctgctgtagcgggaggtgtatcgccggcgtctctcatggcgttcatcacgttgcgtttgcaccgtctaatgatcaaggtaggtacgaccaggttgacggagtttacgagatgtccatcgaggtattccttcaaaggccgcatatcgatgaccaggggcaggtctccgctggccttcgaccctctcagtcgttccgcaagctgctggccagatacataatccgcctcactgcgcgtgatttggggcagactcggcgtactcctcccgcttgggaagaatccaggtgaactgggtccaggggcgagaccgaccgccagatccgctcgagtgatcatcgcctccaactgaggtgtcagaggtgctgacggcggtctcgacccactcgccctattcgaaagttcgtcttcccgaccgggcaaggataatcggaatccggccggtagaggtcgtctctcaaggttctgcttgacgacttgtcctaatgtatccaacctgtccatcctctcgctcagtgtcaggctgtgggtcgagctggtctcggtgatagatccgaaagccggtttggtggttgaatcaggaagcgacgaatcgtatggaggcaaggtgggaattgagtcaggtgtgtctggttgctgcaaggcggccgtgtctgtatctagcgtagagcatagcggacgccagaaatatctaagttgtcggctcatgatatttcgcatccccaagtgactcaccttcatcgcccgatctccctctccaagcgtccgaccaggtgcccgcttgaggaccttgtaagaaatccttgtccacctccatctgcatgggtatcgtcattccctttgcgatctgtaaatcccgctgaatctcgaggagctgcggtaggttgatcgagaggtccgatgctggcgtcaggggaggcaaggcgggcgagaacgtcctggtagcatttgaccggttctccttggagttcttcaagggggacaaggggttgctgttggtcgacagggcggacgagggttgatctgatgcaccgatcttggcttgtcggaccgtggcctggctgtccactgagccagccgagctcgattgtgtaggggattcgaggtcgaggtacgaccgatggaggtttgccaatggaagccgagtaggtcggctaatctctgtcgagacgggaagttggaaggaggagaaggaagggttcgccgggaccgagaagttgaggtccagccttgtcgggaaggtcgttgtttcttccggacttgaccccttgagcaccgattgttcacccgttcgtcccagcatccgctcatcatcaggaggcctcgtcatatcgggagaggagaacgggaactttctcttggacacgctcgaatcagggtgaggcgtgtcgggactgttcctcccagaccccaaggtcgagtctggtccggtgttgatgctaccggtcaacggcgaaagggtgacagacatgaaaaggcgatcgtgaagacaggtccagtctgagcggagttgcagtcgtttgtcgttgctcggtatggcgtgtcaaggcgttcagaataccgcccgttttaatctggctgtacccggagtagttgaagatgtatgggctcgctccgcgctcccaaaaggtcgctccaagccccctttcttccggcaagtcaggtcaagacccctttgacccgcgtctagtgctccaggttgtggtttcagctcgctggtgagtgcttcgagatggtcctccgcgatcaaggtgaacgatcgcggcgtgtgcccaacaccgaggtccccgctgtgcctaggcgaagcgaacctgtccaagcgtgatcgccagtaatgttcacaccgtcgagacttgggttaagccagactgtggctctgctaattggtagctgaattctcgttgtatgggatggctatccgagtgcgaccgacgtttcctccccgccttcgtctaaaagataccaagctaagccaaggacaaaagaggtccgagttattcgaggtgaattgagcgattcggcctccacctcacacttgatggtcgcggggtcgtcacagcgggctcaagttgcaagttgcgggggacaaggctgtgcgatgtcttccaaacttaggttatcacaaacgaacaaccctcatccactcaaacttgattaccgccttctcgctcaaatctcgaccaaagtcgaggatggcggtgtcgagccgttgtgtattccggacagcaggctctcaagcgctaagacctcattaaccacccaagtggagggcaggaacgcgaccttttcgctgctcactctgtctggcgactcttgttcccacctctcgcccagttcccaacgaggtgttttctactccatctcacgattaaaatcttcatcacagtctgagcggatcccagacacttactgtctacgtcgaacaagagaccgcaattcggggacatgcaggaaacgagcgcgaaggcggcgagggtcttggtggtggtggtctttgcagcggtagtcgtgttggtagcgagtctttcgcgcggccgaggctgtgtcgccgaccccaagcaatcaccgcggccggagccggatcgacccgaccctcttagttgccctcgtttggaaaagagggcgattctgggccgtgatcaggtgtgcagagtacttgcttctgaggccgctttgtacgatccactgcgatcgggcagtccctggtgtagaacgatgtggtccgctgtaaaacgaacgtttcggagtccgtgctagtagctagtagaacgtgttgcaaaggttcgtagcgcgcctgtcgtaacagatagccttttgacgacttcctctgacactactgggtacgacgttgaagtctttctggaagtctcagcgctcactgtcgcgaacgactcttgagacgtttataaaatatcgcaaacggcgattgacagtggatcccattgttgcatctcgtctgtcacaggacgggggtgtaataaatcttactagcgaccaacgcttgaaaatcgcacttcatgtaacccatagcaaagtgcagctgagtgccgtcgaatgttaagaggcttgtgaatggcgacatgatgggctcttgctactggcgtgcgctgggaagtgacggaagatctagaacaaggtcaaggcaaaggtcatcaacaacatcgacggtatcatgacatcaaccatcgccatgcaacacctctgaccacattactctatccatactgtctgttcttctcttttaggacaatcaatccttcactgaccccacatctcagctgccagatgaccatctttttcggatacgcggtcttgcacatattccgtgagcctcgtcgttcaaagctgagacgcgggaaaaaagttgtcaggcccaaatttccccgagagccgaatgtccgtaaacttcggtcgatcacctggaaatatcacctgttcatacaatcatacagacaatcacgtcgcaatctcaaacggaacagtaatccaactttcaaacggattacgcggctctgatctgataaggcaaagtcaagcccagctgtcttgcgagagatgtctaccgatactaggatcactcgtttgttgctatcctcggctatcaagcgatgtcgacgtcgatcaggacagaccgcatgtccgattcggtatcggacgatgcacgctcagcaacggtcggagcctgaggtagaactggatcatcctgccaccaaagtcgtccccttccgtcctttgccatcactttcctctcagcggtcgaacgatacggcagtgaggtccaatgctgctgccgaggccaaactcacctcggccgagcccgaagatgatgtcgaacaggtgcagagcaggtttcctctctatcggtacgttgtgactactagccaagtcatttattcgaattcctgaacgctgacaatccggttgaccagagctgaaccgcacttcaagctcgaagaacgtggacagaccccgtccatacccgagctcaaaggtccgctcttgaaagaactctcgcaactcgaaaacgacatccctcggctcgtgaaaaccctaaaccagaagcagaaattggaaatgtccgagaccgagaccgaacacctgcccgagtggaccgaggaacaattgatcaccttttaccacgcgctcgagagctggtcggccggtgctgtacaggacagtgcggatagggtcaaggcaatcgggcaggcggatgaggccaaggggatcgctccgccagagagggaggaaagcctgatgctggttcctcagtcgagacaaaagctgccaaggacggctcggcgagagatcctctcggggctcgtcgaaaggctttctgcgctcgaccaggattctcccaaggctgatgacgacgaggtcaaggcgcacaatgaagggtcgacccaagcggggtcccccgcaagctctggcaacgaggccgtatcgacagtgacacttgaacaacgggccctggacatgatccagcggctgacgcccaagctttccggaaagacgatttccgagctcgaacagtcgacggaatacctgcccaccggtctcttgaggcaggtggaatgggacgcaatggtggatagtttcgtttcgaagagacaattcgagacggccgcgtcagtgctcgagcaaatgaaggtgagtgaccgccagcgactatggggatgttgcctttactgagagactgccctcgatcgctttcggtaccactagaatcatggggtgccggtaggacaggaacgaatagaagacctcatgagagcgtatgccaggactggcgatgcggtcggcttgggatccttcttggagaggcgagaaaagtcgagtgagttttgcagtcgaccgtttagcacggccatcttcgcgaaacctgcctgacatcacggtgaaacagcgggcatcgagacttcgaagcgccacctcgaattcatggtggaggctcaccttgcccgaggtgacaaggtagccgctctccatacgcttcatcactttgaaaaacaaggcaagattctcccacaaagggcgtacactcgggtcatatcctcttatacggctggaacgaccagatcgaccatctcgccgacgccgcagcatgacaaggccgtcgcgtgggacctgttcgcgcacatgcgactggtcgctcatccggtaccatcgagatctacctacaacgccatgatcatgtcgtgcgcagacccgcaagatccccaaccagaacgagcactggacctcttgaccgggatggagcaagagagcaagctcgtgccggatggcgagacatttgatgcggcgatactggcttgctctcgagtcaagggattctatctcgagggattcaagctactcaagaggatgctcggcctgcatcagagtgcgatgttggccaagaactttatcagcggctcgtacgaaacggcttcagattcgcttcagctcggtattacaggctacgagccaaccttgaccactttcaatgcgctactggaaggctgcaaacgtaggggcgatctgagtcgtacccggtggttgctaggcgaggtcatccggctagtccgaggcggggctggtcgaggcgtggacgaggagatggtcgtcaatgtgctgcattgttacgctgccttccagcccgtcatcagcaaggcttccatcaaactatcggtggctaccccggccgagagttccgtcgaaccgattgctgaagatcccatccaggcggaagaagtcggcaccgtgtcgagcgaggtttctaccttggaggacgagcctcccaagcccatgaccttgttcgacgtcggatcgcccgacttttcaccaccaaaaggacctcaaaccgcatacgaagctcttcaagaggcagagagattgttccagttggtcctgcacgatcaaggcgatcaagcttcacccttcggttggctcaagatctccgcgaggacggtcaatgcctatctttccgtccgattcgcgcatgacaatctcgcatcagcaatacagcactggcaagcgatatggagtgagccggtcttgcaggtggctcaagtggaaaagaacgggtggtcatatgtcaccttgctggagcgatgcgcttcggcgagcaagggctccgaaaggcaggccgtcgccagcatattggaaaaagtctggcaagaatacctcgaatgggtggacaaggtcgaccgccagatccgagatcagactgagcaagaggcttgggttatgcgacaaaggcttggtctgggacctcggcaagtggagaaggcgtggatgttctgcatacgttcactcgcactgtgagtgatcgctgtctggtcgaaacgatcaagcgatcgatttctcacccttgccacgtaaacagactcgatcggaatcgcgatgctctcgatgtccttgaacggttcaaatcgagattcccagcctcggacattgtcactccggtcgtgccggacgagggccgaacatcggtgccaaggatccgtctgtcttccgagatcaatttgctagaggatcaggtacctccacacctcttgttccacgacattagtatcctgcatcaaagactcgtccgagacggggacttgcaaggagtcggtctggtcaagtgggcctgcgtaagctatgaaaaggcactcgagacaaggaggagtcggagattgaacagcaagaagcagcagagcaagggcacgaacaagcgatcctgatagagtggtttctcggctacaatgtacgggcagttcaaagcgattgtttgaaggaaccgtcaagctctcgatgtagttagcgcgttgatgctatgggtcgtcgatgcgcttatcctaccagataaacaaacaaacagtcgaataaacgatacaaagaagccgcgttagcatcatcttcgctcggaagggagctttattgcgagacatgcgcgagacaacgacaaagacatgtcgtctgcgtggaagaagcgccacgtaggtccgagcaccgcggacaaatgagtcatttcatgtgaacgaggcgtagaaattgctgtcatcggcgacagaaacgccgcattgggcggaggcgtaaaaacgtcgacgccatctcgtcaacagctgacgagattgatcacgatggaaagtacttccgaccgggtctaaccgatccagaccggtttcctcgattaacaccgccgggacgttgacatcggggatgttttgtgcttcccggccgatctcgtagaggaacacatacacttgcaccgctgttcctgtagaggatatgatgaaagccaccatcgaatacccctcgccggatctactgaagtttcacaccagatccgatctctggtcgacagcggccgcttggaacggctagaaggtaccgatcgatggtcaagagcgttcgtctccgagacctggttcagggcgtatctcgccaatcgtacaagggcaaggaggcagtattcagaatcgactacgaagttgcgaaacggcaacaagtagtatccatttgtgctgcaacgatgagaaatgagagagcggaagtgagacctgagtatcgtcagcggcatgacgaactgactcggctattgaggatgtctatcaaatttcccttcggcaaaggcgttcggggccgcgaggcgagtgtacaaggcggattgtctgcaattgaaaaccaccgaggtcaaagttcgaccttcccggaccgacacaatcgttctagttccgctgcgcgttagtcgatcgctctctcaccgcccattgacgccgcgcgagaccgttttttcgtagccattttgctacaagcgagacggacgatagctgctggcagcctgggcctagacccgagagagggggctccctcgggatcgacccttttccagccgggagcggatgatcgtccgatgtccaaaggccatgatccagggctatattcgccccgaggaccaagcgaccgaagccactgtcaccgtctttgtcggtcctcgatctctctctctctgtgcgtgtctctttttgtgttttgttataatccacgtcggccaaagcttgctagcactggacaatcgtttgcgactttcctgttgctccttcttgtgttgtctcttttcttctttcgacgttatcggttcatccccagctcggtgatccaccttgaaaaacccacctggtattgccctttcgtcatcccggatcgtctgtctctcgcttcaaacccacgggagaaattcaactcagagtctttggtcggttcgaaagaattatccgggacgtggtcaatcgattccccttgtctcgacgacaggaaccaggtcgcctgtcatcatcatcgtcatcaacatcatccttcactcgaccatcggcatcgcacctgctagcagctagtcgaacgtccgtcgaaaatagagtctactacaagcaacacggcgagccctgacgagccgtgaaatcaaactgccgcgggtgttgacgacaaaaaacagaacgccgcatccattccagtaggggtcgaacaagacgatcgtagacactcaggccacaagtgttgtctgtctctcactctatcggttcggccgtaccgattcggttctcggcgatataataacctccccgccgctacccatctcaaccaacccctggaacgaaggagtcaggagggaggcatctttcgttgccctttcaagccgcagccgactcatacattttgtcttgaacaatctcgcgcgactgtcgcccctgaccgaacacgccggcccttagcacgccactgaacactcacaccatcgccgtcgtcccgtcgccgtcccctgccaatcgacaccgacaacctccaccactagtcatcccgaccccttccgaagacgtctgcttgctgcttgtctctttctctttctctcgtttgtgtctagattgtcagtacgcttgtctttcctcgccacgggccctgacttgtcttttgtctcggcccgggcaatatcccccgtcccgctgctgcctgaacgtcctaaatgactgattcatgagcggtttccagcttttaacagacgactcactatcaaagagagatccgcttctgcctccatacgatagcgcctggctccgtatagacgattggtggtagtgcacgttgcccataccttataaacacaaggaccaccccggacccccttcctcaacatgggccaagaatctgaagagtccagcttgcctacgctgcaacacttgatgctgcacgaagggcgaaccgatatcaacaacccgcctcgacctttcgacagccatcttcgacagcaattcccacaagcgattcgtcgtaccgcttccatggacttacaacgatcacctcgtcgacggatcacgtcgtcctcgctcttcaacttgctcaacgatgaccctagtactgctaatgcgacgaccacaccaccacggagccatggcaacaaggccagaattccgcgatcgtgttcgcccgacgaaacaccgcgggcgagcgacgtctctagattcgggtcgagcacgcactttctgcctcgcaaccccgtcatgggagcctcgcctccacaacctgcaggacagggatacatggccgctcgtcaggattcgatcccttcgctcctccctcctcctccataccttcgcaagggctcggatccgttgagcgaagccgagtcgtccttttccggatactctgatgtcgagaccccggcgaggcgatctttctcgacgacttcgtcgaccagctcgatggacgatcacgagctcaactttcgacccatgaactcggtcggataccctcgactgtctcatgatgatcaacggttgaccccgcccgaaaagaggagtccagactcgttcttttcgtcttcctactcgtcggtcccgcgcgcggttgccactcccggttcgtctagggcgccaatctccaggaccaccaaggcatgcaacgcttgtcgaagccgcaaggtgcgatgtgacgctggaggtcaagctgcgacgttggtgggcaacgagatgccttgctcccgatgtaaagacgctggtctcacctgcgtctactcggcacaacaacgcaaacggggtcctacccctggttctcgacgaggggagagcacgaccaagaacaagcggggtggggaaggtaacgagaccccgagtcgtcggccatctgccatcactacgcacaggccgtcacacgcggaagacgatcccacgatcacgatgcgcatgttgagccgtcccacgccataccgatcggcctcgatctctacctattctcacgcgccttcggtgtttgattcaagggcgccccagggaggctacccgtaccatcacgacatgcatccacccccaccaccacacgacaacatgtatccgtctccgaccgtgccttctcctacctggacccattcctttaccagttcttccgcctctaccagtccgaacacgccgtatctgcccacttggagtcagatgggcataccgaccggtacaggtccactcgctacccctcccttacctcaggatgatcatgctcaccgtccagagagcccggccattatgggatgggctgggagcggtgcgccggagggcaagaatcagacccctcccgagcgtccatcgtattctactcagagcagtacctcggcgaggtcttcggccgaggaagaagcgttccggaatgggtacacgatggcctttgctcaatttcagaggcaaaaggagattgatctcggtcaagagccggacatgggatcggttcgattgccacccatctcggttggaactgggcgatgaggccacggcgaccagcatcaccgctaccatcacgaccaacaggaattagatctctcgctttgaaacacgcgcaagagcgggaattttagaatcaacacagcgacactcggcccaacgaggaggactgcgagtccagcatcgtggtgcgtgtcatatacacgaagtataataatagccacggccatcagactcgacatttgaagatggacagtagtgtatagtagagtagtaatcatggcgagacttgtagcatagccccattggcgcgcatgacgactatccccatcacatagtgtcatcatctgcgtcagacgagtctcagtgtgaacgatcgattcatcactcaccgtcgccaaattccatgccctcttgcacccgtctcgataatgaagccggtcccgctttccccatatcgaaacgcgttccgtgctctcgcccgaggacgtttaattcaccaagcccgtgtacgaacatgaacccgttgcgctcccgctgaattgaccgagcgtcgggtgtagcctcaaaccccggaacctcggcctcagaaattgaactcccccgtcccgtcaagcatacgactatcgactctttttcccagccacagaaaaacccaagccatgaacacacatacgcacagtcatcggatccggccgaatggtccgaccgcaagtggaggttcaccgattagcgcttcaatagggtccttcgttgaacagtcatggtcacgagaatggaatgggttgattcacctcactcgctggatcagcacagaaactagactaactactagcggccaccttggctctcattcccactcggaccctggagagttcgaagagatgggagatgcctgtctagcgcgtaatttaggacgcggagatacggtttatccgagagaccgggcttcctgacatgatccgactagactcgaggggacctcgatcaacgcgtaacagcgctgttcggtggttgctcttccggcgtttgagaggcagcgctggttgcaagaggtggtgttcatatcgagacggaaagacgatgaatatacgagctggcccgtactgccggttcggatatacgtcgcgtacggctcagtgtctctcgacccgttccgtctagcgtccagaatcgacatcacgcatgacgcatgtacctcttgggatggcgagttctgtctcggtctttcatgtcggattgtctcctcagtagaggcggggaacttgacgatatcgataaccgatgcgacttggcagttccgagatcgacgattccaaaggtcaaaatcgacagatccaggcgcttgcagaggggttcctgcgaggaaagcgatcgggagattccgtccacgtagtttccgcatatcggtatcggaatcaaaattccctcgatcgtttgctagcgcaggggattacgcgaccagtatcgatcgattgagcaatgccgtaatgactgggtatcgcacggacattgggtagatctcgatgccctcccgatcaatggcttgaagatgggcggcgcgggcgggttaacacgcggagagcacaagtcgatcagccgggacagggttaccaaccggctgccacactattatggggaaaagtcccgaacgcggtcgacaacaaacccccttctgtcttgccttccctgccctccacccttttttagctgcttccctgcctttggtgatttctacttccgtccgaaatataataaagacacagccgtctagcctgcgtccgtctgtcttgccccctaaacccaccttggtcgcctttgcttctccttgctgctgcaaagagacgatggcgatggcgatggatgagtcaacaaataaataatcatgagtattctacaatgaatccaccctcgaacttggtcagtgtaccagtgtgatcctttgactctttcgtggctcgcggctcgtccagccttttccaaccatccatcttcggttctagcctcgtttcttgtctcagaagccaactttgacagcagacaactttgagaaggattcccccctcgcatcaggaaaccatcacagatcacagagcgatatcgtcctaccttttcacaacattgcactacctacactcgttggtcatatcaaagccgttgtacagctaccacagtcttcctctttctctctctggatacctatcggacatgtttcaccctaccatcgatatacatcattctctgcaacacactcgcgatacatactagtccacaaagcaatcgagatagatcgaaaatctcccgtccataaagagacttacccatcggtccgacgcccactagagctcctccagctcgtctgagccagttccgaccccgaaccatggcgaaccaactctccatcgatacttcgagctcgacgtcgagtccgctcgtcccgcctcaaccatcccgtacacgatctccactcctctcatcaccgtgtgccatctcctctccactttctcggaagcctctctgggcgggacaagaccctgcccggctggccgctagggaagcgtcgattcgggcgaggatggaaaggaggaggaacggatccgaagatgggtccaggaggtccgtctctaatccgacctcctggcagtctgtcaggtctggtcaagatgcatcctccttgcccttgtcaaaaaagggcgtcacgccggtgcgcatccccaggacgccagagatgtccccggtcaacatcgatctgggacgagagacggccctcccaacacggagcgtctatcctcgagcgtactctccgttcgacgtcgggctcgatcgggtgcgctcgacgttcggcgacccttcgttcctcggaggaggaaggtcgtcgactcctcccacccagcttcaccagctcgtcgaactcgagcagaacaatgacgacttgagcgagattggaccctggacgtcctactttaacgatccttaccggtcgccctcggcttcacccgtcggacgaacgagatcctcgactgccgacgctcacctgcacgtccctctcgttcctcccggaggttcacccaggttgccatggatggacgaacacgacgcccagtggagagggtcttcaccgacttcgagcgtcagagcgtccaccctgacggacctggacgagatttcaaagagcttgagcaagaagagtaggaggttatccagcgcttctctcttgacggcgggttcgcccggtggggacaatgacgacgtaagaggcaggcagcaggaacacggtatgacggatttcggacctcttcaccccagacccgatcggactcggacgtcgtcgagtgggtactcgcggacgggatcctctctagtctccccctgttcgcccttttccaccttgccgaggagcagggactcgatctcctctctcatgagtctcagtacgacggggcgggccactccgatcgggatcccccctcaagaaccgctgcccttgttacccaccaacaagaaagccaggagaaagatcagggtacggccggtcgagaacactctgggagggtgggaagtggatcggacgagctctccggggttaccctccatcggtctgggactggggttcccgatcttgccacgcacgccgatacgcacactatcaccaacaacaatgcaagcgcagattcccacggacgacaaggaggaactccatcaccacaaagacgttcgaacgggacgaactttgacgatgtcgaccaccccgaacggcatggccgaaagccctgaattggcgcactatcgatccggcaaattcggtgcgagcgagatcttgcatcctaccgctcccaccacgtctgtagaactgctgctacccaaggacccgacttttatggatctcgcgggactgctcgaagacgaagactcggacgcgacgataccgaacgggcgaagggctcgcaagcggaattcaaggatcgtcatggatttccccttgcctcccgctcgaggcctcagggtcaacttggagacgcatccggaagaggaaccgagtcggccgacgttaagtgaggtccagccgggttgcgcagcagtagcgacatcaagctcacgcactgcccgctattctacagactcgtacgacataactttagacactccagatttgcctgcttgtgctactaaacgaaaaggcagcatcgctagtgaaacgacatgggacgatgaactcggtaaccccatgagttgctcttccttgcgctcctcctgctcctcccagacaactgctccctcctcttgcgctcaattgaccccgcgtagcagcctcgaaggcatgcctcgcctccgtcgggcatcgtgtgacctcgactttcgacaaagcctcttggcggacctcgatcagatggaaagcctcactgacggcaatctcgccgccatgatcgaagaggtcgagatcaagatcccgccattcaaacagacgccaaaagtcaccggcgactcgtccggctcctccggcgattcgaccggagcgttggtcacctcgaaaacgtccgcgcgtaaacctgcgatcgaccggcgacctttgcttccgcccggacctgacgcggcttattggggggaacccgagatcattctctctgacaaggactttcattccatcctctctttcgatcaccctattcacacgcacattaaagtggacgacccgaacattgtcaaagtttcgaattctttcattaacgacccgatccaggcacctcaaatcctccgacccgtcactgtacctcgcacacctcaccgtgcccgacccactggattacgccagccaaccccttcacgactgccaacgatgcaaactccttcacgtcgtatcccgactggccatcaagactcgtcactcatggcaactccccgcgcaagcgaccagagagtcgaccgcttggccgcctttcttcccatcggactcggactcactcgacttcggtcgaccgccgcggtgcgtgccggatcggcagtccttcgtaacgtcggccgggtcggaaccgccgtgtccgcctatcaatatgcacggcccgcctggggtcgtttgacggatcgctcgagcaagaattacgaagggcatgtgccgttgaactggtttgagaacgctttcctagcggctgggagcggggtcatcggggtggcggacacgtcacggggaggtcagtcggatgttctggccggctgcgcaaaccgcgtcaacgctgactcgtggctcgtctccctataatgaccagacctcgtcgcactgttatccgagacgtcgtcgcaatcgttcatgccccgactgcacgcctctatgaagtctgaacctgaaggccgacagatcttgagggaccgacctctgatcccgagcaagaccatcgacctggactatttgcgtactcttcgccgcgggactctgggacgggaatgggtcgaatggctcatcgaaggcggcgtcacccccgatacccgtcacgaagtggttcacatcgattcccccatcctcgcctataccatgacgcggtatcgtcagacgcatgacctctaccataccttgttctccctgccacccacgctcgcctatgagctttcactcaaggtcctggagctctccaacatgtcgctccccgtcgccggtttgtcctctgcattcgggccgttcagactttcgtctgcgaggagaagcatgtggagggaagattggatgccctgggcgctgcgacaaggagcacaatctcggccgttggtcgggatctactgggaaaagagatgggagcagggattgggcgatcttcgtcaagaattgggcgtcaaacggatggacgatgccgcggtgatcggcaggtggaagtcataccggctcgttcgagaaaaggagagggatttgagagtcaagggtgaatgggtagacgagccagaagcgtggtagtaggctcgtgtcacgtagatgtcgagacgactcgtttacgacggaattgtactcgtaacgaaatgacgaacattaacgacggaactgcacagcaaattctgatgtccaaaagatctacctagccgagaaaaggcaaatggaagcgataaagccaacacaacttagtcatccatcaatccagatttgatttcgtttcatgaggacggtgtgaggacactgggaccgtgaagcccgcaatgcctcgatttcagaaaaagactagacgaaagaccgagcctctccgccgttacaagtccccacaccctgattctcctaataatccacaggtcctttccgctccagacgtttccttccgtgctccttccaatggatagagtatgttggggagatccagagactggtccgtcgtgagaaccacaagaggagtgtggttggtgctccggtttcgatttccgggtttcttgcccagatcacttcgatctagctctcatctttcttctcttacgtctgagacgtctcatgcgcttctttgcccactgagagatgcaacgattgaagttctaagtcagttctggttctcgagatatgatggactatcgatgcgaagaagtctcgacgcttcgaaacgatggcgtaacaaagcgcctgcgacctttacgcagagcgcagtgtgaatgagaagggtgtatgtaccttggctctcactgataaaagacaagcagtcaaagaagtcagttgatatggtctgtcgagcgttgcggaacccgcaaacagcctacttactcgtgaatcaacgaataacttggtaaagttaagggtggactgtgtacgatgtcttctggcgagaaaaagaagtcaaagacgggtatggtcggtattcttggatatcgatacgatatgtgtcactcttgagtgaattcgtcgacgagggtgacgaggggtggggttggtgacacgggtggagcgagatgcgcttgaaggcctgaacgattgcgcttcttcgaggaaaagcgtgactcgcttatttgccttaaaatgttctgccaacacccgcgctcggagataatgatgattgagaatacaccttatgtcgatttgaatgtcaggctcacgcgacataaagcagtatcgttatctaatcagcggccgccgttgacgacagatctcagaccctgacggctaatcacaacgaaagtctcaccgctgaagcacgtcttgcatacgggaccgcaccgcttggaccgcaccaagcggtcgaagttgacaggccatcaccaaaggcatcttcgggcgaacatgagcgaagaaacgacaatagaccttggaactggctatcgcggcctcctctcaaatttggtggacgttgccaattgcggcgctgctgggttgaaaacagatttggacaatccgatgcgatgaagtctgagttgcacaacgcaacttcagatcaaaccaaatccagatcagagggcctcgaagcatgatagatactacatgcgtcccgagcttgttgcggccgcgaccacatgcgaaaaaggaagaaacaccaaccttgctagggcatcagcttttctccttctttctcccgcctccgcagcattactcttgcgagtttatcgatgccgcatggcattttcccttagatggccttttcgtcgacatttttacagatagaggtcaaagtttccatgaagcttgtagcgataaggaatgaaaaggttgtcccgcttgcaacatggccgattcgtttgcaactccacgttgtcttcgccggtgccgcttcggcacagacggtcccgtgctgtcctttcgccctcagactcaatttcaccttgacgctggttcgccgaccgatcaatgacaagcaatacatgtcctctttgtcattcttccgctctaatttgtctgctgcaccaaaccttccgacgacttatttgtcctgctcgctcatcactcgtttgccccgacccctcgattttatttttcaacgcgaagcttgttgtttctacttcacaaccggagtatgtcttcctgctacaagaagatctaaagcttcacccgctacttctcaactgaacagtttcttcttggcttttgctgcaactcgatctccccgagcgtttccgcctgactggccccgtcgccgagctcgatgtttcacgcgctggcgaatctcggatagcgccgcaacgaaagagtgacgaagacatcgagaccgttattttctgcgccgaccggaagattagctaaatgtcgcttcgttccgataacttgagcttgctgaggcttgctgggcgtaatgaccggctaagacattgacctcagaccctatcacttggatagtgcgctcttggacctcctgtgcctgcgtgcccgtgagaacggcttgcctcgcgattgataaccatctggcgatacctaaagcgtctagatcctcagactggtgccagagatgtgtcgcacgtaactgtgataggttcgccccttccttgaatcaaaggaattgcgcactaggaattgcaggacgcctggatgaggatcgttttctcacttctgcgtgagcaacagatctgcaattcccaaatcgttgtgatcgatgattgttctgcctttagacactatcatcacggcattccctcattgttatgcaatccgaatgaccttggtttgacgtggtcacttttgggatggaacaacttgcagagatgcgatgcgaagatagttcttatcgtatgaatatcaatttctttgagaagtcaattacccgagacgctatcgctgaagtggaatgggctttgagcagtcttggattcgccgagaattttcgtgagaatttgacataggccctgacagacttgcgccagatgtcacatcgggacagtctgctagagggccttaatgacttccaaacgtaaaatcgactgcacactttatatccactgatcatgacacaagtttcgtcgctgaccctcttgccctgcttggagacgtattctgtatgattcccttcatgttataaggcatcttttggctgaggagtcctaccaacgtgcgacatcttgccggtgacgaagggggtgaagagctgaaaccaaaggccgatggtgatcaggtgctgataagtggagacaatcagacagggatatcggagcggcggggaaccctcatcacctgaacgaagacggcttcctatgtaatttcactgggaggtgtgcttgtatacgactcgtacgtttcaccgtgcctaaccgtaggtggacattgcctgatggctaatcgattggtttccttccgcctcgtccccactctccattgcgttcactgaccaatggaggtcgattcctgctatactgagacggttttatcatgaagtaaatgacccgatccaatgcttgatgaaagagagtctgattgcggtgtgaaacggcgaatgtgctcctgccgccccaatcgatagcgcgatgcggggtctttaagacaagagcgcgccaagctgcttgcaccaacatcgatccaagttcttgattcgcttcaatgtagaggtgtagctccgctttgattcaaaggtgttgctttccttcgattgagaactaaaaggcaaagaaaattctgccctacgcagtgcacgaatgtggaggcttgagcttgcgatctcgaattcgcctatgggctatcagctgacgagttcgttacaggcagaggcgcacaacagacgtaaatatccatagatctatagtatgcgtggtgttaaaagcactcctctatcccgtgcaacaggtttcgtcaaaaccgctatctctgggtaggccagtgctgtcaatccgtgatcgcaacctctacggtcaggtcttcccaatgtgaccatggcacatcacctactgatttcgagtagttcaccttgatcatatatggtgccatttgcatataggatgctggtaatcattgctagaggtgtagccgtgctctgaagtgccgcgcggtcgatcccggaacggtgcagtttccctccccttcgccttttctacatcgacaggatgacaagctggaatttacgccgagccgagtcgaagtgtgatgcttgaagtctcatctcggcattgacgttgtggagtatcgtaaactttgtagatcaagccgtgttttcgcgaagtcagctctagactgtgctttgagcagacttttgaataagctatagacgcgttgtatcctcttcttttgcgatcaccattacgtcaatgaaggtcgaagttgacacactagccagcctcgatggaccgcattgactgtcacccagcagtgtttggaaacggtcacgatgtagtagggacaggctaggttgctgctttacttcacgagcggactaggccatgatactcctccgtgaggacgacttgtcgagaagaagaggtgcgcgccatggatcaggggctgaatagtcggcttccatctgacaagaggttcacagtcatcccatgtatatttctcggccacacatgcctacatcttgaccttctacctggcagcacacgctcaatcgcctcgaggcatccgcggctgcccctcgctttttatcctacaacgtccgtatatcctgggtctatatcattgagatttagaccagcttcttctcattcacggccgaggtgacggggtgggagtcggcggaaaggaccttgtgtccgggcaggaggtaagggttgaaggaagcgttgcactacaaagacgaaatgcgacgaggctgagcgagtgcgggaggtgcggtcagggaggtctgaggactgacgttttggtaagcgacaccggcaccgaagctgtcaattaagcaaaggacacgatatatgaagcatttagagattagccatcaacttggcaaggcttttgaagctgagacgtaccctgtcgagagagctacaggccagcctcgtcctgtaagaaggcgtgagtatataacacagtcagccaaatgaatcctctgcattgcgccttcttgaacccgaatgttcctcctcgtaaatccaaaaccgatcgaattcggttactcacgcctaaacaagagcaccgaagcgacgacaccgacgctgaatccgataccagaggagacgacaaagtcggcgagctgtgagggttaccaccggaaacgcagattgtcagcccttgctccttgacatggtcattatgagctcttgatcgcagcaacgcatcactcacacaagcgtcaaactgtaacacggaaagggtcgggttcagttttggttcacgcattgccaacgtatatctcgaccatcagactaaccttcctggcgacgacgtcctcgctggcgaccgacctgacgggagcgggaggcgaggggatgggcgaaggagcgctagtgatgtcggacatgatggatttgaagagaggaagatgcaaggtgtacaggggtacaggcgactttgcagaggacgaggaggttgtacgcaatagaggttgatcttgacttgatcggattgaaccgggtccgacctcctggtcgcggtcgagccgtggttcccgcgctctaaagctcggattgcgcggagaaggggttcaagattctaccccgtcttggttcaagatcaccaccccccttgacgtattgactatacagctatacatcgtcctctccgactgtcaacgaatcaactacaatctctgacgagaaagcagaccaaattgtaggtctagccgaaaaaccaaaggtcgctttgtgccggtacactgaacattcaaatcccacctgacagccgcacaaaaaatgatcgatcttctccttcgtatgtctttcgaactcggcccctcgagttcaccctacgccctgttctgactcgccttgattacgattacagtgcaagtagccaagggtggaaaccctgagatcgtcagggagtcgcagcgaaagcgtggcgcgagtgtcgagcttgtcgatgaggtactcgagctgtacaagagctgggtcagccgtaagctcctttccaccttgtcgtccgagactcaacaacagctcatacctcgacggcgaccctcatagtgcaattcgatgccgaggctatccgtaaaaaggtcaacctggtgcagaagcagatcacccaaaagaaaaaggccaaggaggatgccgacgacctgttgaaggagaagatcgctcttgacaaggactttgccgagatgtggaagagggctgcagacaaggaaaaggagatgaacaccaaggctgctaccatcggaaacattgtcgacaaggactgttacgtctcctcgaccgaggtatgcacggcgcggcttggcgggaacgagcggactcatccaaagctcatcttcgctcatcacttgaacaggacgagaaccccatcaccaagctgtggcatcccgagggtcccaaccacaagggaatggacatggagcaacgcggtctcggcgagtctgacgtcacccccaacatcatctcgcatcacgaagttttggccagactcgacgcctttgacactgaacgaggtgccaagatcgccggtcaccgaggtttcttcttgaccaacgacggtctcgacttgaaccaggctttgatcaactacggcttacagttcttgagggagcgagggtacaagaaaatccagacgcccttcatgatgaggaaggatatgatggccaagaccgctcaattggatcaattcgacgaagagctctaccacgtatgttccgtggctcaaatggaaattggctgcgcgaacgctggactaaagcttttcgtggactgcaggtcggtggcggtgacgaagacaagtacctaatcgctacttccgaacagccaatctcggccatgcacgctgacgagcgaatggagcctaaagagctgcccatcaagtgagcgaccgccgggagacacatgtacgactttgatcctgacctgtcaccatcgatcgcaggtacgccgggtactcgacctgtttccgaaaggaagccggttcccacggaagggatacttggggtatcttccgagtgcatcagttcgagaagattgagcagttttgcatcaccaagcctgaagactcctctgctatgcttcaacacatgctcgaaaattccgaggcgttctaccaatcgctcggtctgccataccgaatctctcagatcgtttcgggagctttgaacaatgccgctgcgatcaagtacgacctcgaggcatggttccccatgcagagagagtacaaggagttggtctcgtgcagcaactgtaccgattaccgtgagcattgaccgtattgccatcaagaccatccaggatctaaccaaactccgcgcttgccagaatcccgaagcttgaacgtgcgaaatggagatcgagccgccggaaagcccatcgaatacgttcacatgcttaacgggtcagtaaaaggttgttacacagagctgacattgccgataaattgaccaaagcttgtttatctcttaagaaccttgtgcgctaccgagcgtgcgctatgctgtgtcgtcgagaactggtgagtgatctctttcacaaggacaagcacgcaccgtccatggcatctcattcgctactgtattggtcacacaggcaaacccccgaggtacggctgattttggctactgcaactcccaagcatcactgccatccatttactaacatatctgaatctcacagggtctccgaattcctcccgttctgcagccttacatgcagggacgtgacttcttgccatatgtcaaggagctgcccaaaaactcgactagcaacaagaagaaatagatgtttgcgtaatagtgctgggtctcctaggttagattaccgtcttgcgcgttcctctgatttcggccgacaggagcgtttctgggccttgacgatattctatcattcttcaagattccccggttggtatcgtctgccgtcggattgtcttagatgtatgggagcgaaaagtgacggctggcccagaggctagaggttgatggcatctacctcgctcgtgtggactgtcgattgaccaacttgaccatcaagtatgacgtaatggtttcgatcgggacgatctcgaccatcgctgtaaggactgttgtacagcgacctttacacgcttgagtatgagtcgtatcaagtccagaccgaggcgacaacgctgctcgttgcagtcgaccgaaacgctacagacccgttggaacataatggcacctccaaatgctcgacatcagcaaaccagcagccgaagagctcgggctcaagtctcctacaaagaggaaaagtctgatggaacttctggtgatgattccgaagacagctataacaaaacgagcaagaggaagggcgggaagattgagacgatcaagtctgacagcagttctgaggaggaaacggatggcgaggacgatctggacagcgacgagctagacgccgctcctcggtcaagcaagaaggtcgggtctgacaagcgaggcaaagctgcaccttctggcaaacgaaaacgagagtccagcaaggccaagccggcaaaaaagatgaaaatggtgaactcaggagatccaaacgatatcgattactcgcaagatgaagatgacgacgacgacgacagtatcgagctgggagagggcgaagaattcgccggtaagccgttgtcacagcaggctcacacgcgacatgagctcatctagctgcaaatgcaggcaagatcataccggctcccagaacgggacacgtacctccaggccaagtatcgaggaatacattcaagttcttggtcaatttacaagacccggccaagaacgaccgggaatggttcaaattacacgaacctgcgtataggctcgctgaaaaggtaacccacatggcaccgaccgcctatcttgcactttcagctcgaaggtactgatcgcaattcacaggaatgggtagcattcgttcaggccgctattccgaagatgaggcaggtcgacacggaattgccaatgttaccgcccaaagatctgtgaggtcgaggtgttctagcttataaaatcacacgataggctgatgaaaacgacccgaaagaattcaccggatatatcgagacgtgtcagttcaaataccgatacacaccgttggcagcagattgttttagtactcacgtcttctcgaccaacagacgcttctcgaacgacaagaccgcatacaaacgtcacttttccgccagtttctctcgaagcggtcgcaagggcatatgggctggttgtgagtcataaataatctcacagctgagacattgctgatatctacctgaacagatttcatgtgagttgttcgtgacgagatatttttcaagatcagggctaaaggccgctttcgatggctcgctcagatccagtgagtcacacacaaacagcatcgccaaagacagtaagatgctcactttcacccattgacagtccaaccgcgaaacaagtcaatattaggcggaggagtatgccatgatcgcttgctagtagtccgctcttgagctcgcttatcttgatcccccatctctgtctaggtctggggtcctgggaagaacgagctcgcttctatccggttcgtgagctgtagtgcatacagtgaacgaggttactgacaaatcgctcgggatcagacgcgcaatacagcaaaactctgctcctctaaaagaaatcctgcaagaacaggaattttgcaagtattttggcaaattcgatccggcatcgggcgcgcgctcgaacgtctttggccactcagacgctttgaaaacagctccaagaggcgtagcgaaagaccatccagatattgaattactgaagctcagaagcgtagccgccgttcatacgtgcgtctttcacgttaccgaatacagagcgcgagggttaatgagttgaataaacgaataggttccctgacactgatgtcttggacccgaaatttatggaaacactgttggagacagcgcgtgccatcaggcccctgattacatagtgagccattagatagatgtgccagaggctaaagatactgaaggaatcttcatccagtttgaatagtgtgatagctttaccagcccctggtgcttgagcgtcaatgttgtattgatatacgcatgtctcgtacaccctatttgcatcaattttacaccttcttgatcggtgaggtggccaattgtcctcgcaagctcccatgcctcacacgttcgtccaaggcagaaatccccatccccacctgtatcggcgggtttgtcgtttgagtttcgcacatcgaacaaggtcagcatcagatcgacttacttcggccggagggactgggatcttcgggaacatggcgttgggcgacccattcatggcagcagcaccaacttgctcgtcagacatgccttggtagcccttggccgtgaccggaacattcgctgtttgccgatcaaccttggccatgttctcagacggtttggtcgctacgcgaccgttgcttttgatcaatgtccttatatcgctcgaagcgtgtcagcaactacatggctcgttgcatcgattggcgggcttacaattcttctagaagcgcagcatgcctataaccgagacgaatgtttggcacgttcgtctgaaaaaatactggtaaataacgttgaatctttcaagcgctgatgagagcaccgaccttgtcaatatcgttgccggccacgcctggcagataccacttgtctcctagccagtgctttttgacttgcatctcccagccactttgcaacaccgagtttcgagcaagctcgcacatgtctgaggacgatacttgctcaagtcagaaccaggtgtcgattcaagattgcgagtacgtaccagctggtgtgaacttgtagatctgtggaaatgacaggagtcagcgtggctgtcgatctgacacggaagatccactaggcctacctgcgccgcgaccgagtattcttcctgtgatggagcgctgtcagtaaaagatcaaacataaatgttggggcggaccgaccatcaggggttcctgttgggtttagagacaggcataagcgcctttcgaaatataccaagagcagcacaatgacataccttggtcaggtggaattggctatgattgacggaaacgatggcttctcagcatgtgtgataccttaccgattcgaggcatacgtacagagggtcatccgtggaaagagagactgcaacagatatttcagcaactgactgtcatacgctaaagccaacgcgtagacataccgttcaagcctgtacggaagaagtccttgaaagggtttcgctcatacgtcaagaacctttcatttgacatcttagcaaccgacagacattcgctcgtgcagcggcgcaaactgacaaggcgttgttcgagagtggactcatggcaaggccgatctgcttcaaataaaacaggtactgctcatcggaagcgtcagcgggtgactatactttcccaagataacggctctatgacctacttgaagagccggaactttccgaagcaaaattccatgcgagatcgagtgggcggcaaggaaacccgatgaaagatgatcgggatctccagcttccccacagtgcggcctcagcacgaaggtgtctgtcacaagcatgtcagcatatcggaaagaaatcaccgaatcactcgggactaactgaacccgcgagctcgtcgccaagcattcagggaagccatgttggcatacatgtagtaaatcctaagcggcaaaagtcagtccctatatatggtcgatctcctagcgactactgtaactcaccaatagctgtaaggtggtccttgagcagtgttccaggtacccgcgactgggaacttgcggtaaagacgcctctccggcttggattcgtcatccacactgtcgaatcctacaacccgttggaggaagacgtgcaattcagggtgcgaggatggatccttggtaacctcgaacaacggctggaagacgtctgcatacggcgtattacgctcagccgccccgcttgcgtcggaagatccgtattcgactcactgcgtataatgtcctggaaactgtcgatctgcttggctcctttgaaaacctcgtacaacctgggcacttgaatgagccatctcaaattgtgagagaagagcttatgcttcacgacccatttggctaatttgtcccattcattgatgtttcgaccgtaaatactcaaacgccattccacgttctgtaagaggaaagttcgtcagtcaccacttctgttagcgatatgagtcaggaccgtacctgatatttgctctgctcagcgtccgcaatgacctctgcggagtatcaccatcagaacccgcagcggaatcaaaatcctctcaccccacttggttccactcacctcgcgttagctccgctaggtatcgccctccgaggtagttgtcggtctggaaatattgtgttgagcatggacttcttcgcccggttctagcaggtcgagctcaccttcaagaagatctctctcaatctacttgatccagtgggattgtaacggtcgttgaatttgtcgaatcggtgaaattcctgagaacacgagtgattcagctacaaagtactctgatatgtaaccgagtcgcttacttgatgagcgtgcatatccagagtgtcgatcgacaagtcgtaagctgtcaaattcagactctgaaacacctcctcgagagaaagatatctatagcagtgacgatcaacgtgtgtcattgtgctgtttccggactaccggactcacttgccatcacggaagatgacggtatcctgtcaggaggagatccaggcaaatgaattgaagttgagagactgatcgagattgcgtctgtttctgtacccactttgggagagtgcttcatcttgctcttgatgaatcgcagcaagtgcttctggttcatacttgccgagtggtggacgtgagtatcgaccttacgaacgttgtaaaagtctctgaaaagcaatgaggacttcagttcgtgttccggtccgtcagtcagtctggcaacgctcacctatgcggcactgcctgtgaatgtcgataaggtgtcagtacgagagctcgtgtagtttgccgagacaataacagaatagcttaccttgacgtcggcaatctcttgatactcgtttaacaaagtgtacagcgaccacttggactggagatatttcagtcgtcggaaggcaaagcttttggctggaccgtccgaacagacactcagaacgtaatccaagtcggtgtagtactctcgtagagtaatgtttcggaaaagtcgcttcttgtcttccgctgtgaccgacacagagggatggctttagctgggctcagtgagacagagttattcgcagtgacgcacgtttctcttcggccttttcgtaaacctggtagacaccagattcgtccatttcaaagacccagccgttgttatcgacactcggaatatcgcactctgccatgtcgaagccctcgctgccattggtacctctagccttcgccttttcttgagcgaaagtgtcgactggaacccccttgatctgaccatcgggaccacgctggctttcgtcgtatccttcgccgccttcgccttcgatctgtccggccgctttccagtgccagtgacgaggaggtggcgaggggtagatgttccatcgtttcgagtccacaccttcgcgtcgctcatcggcgtgctgagggtcgacgtcgggtcgcaaaccgttgacatccgccttgtgaggggggttgaagccggcaaactttccgtcgtgatctcgagggttgtcaccgaggcgttgtaaagagacctccatgtacttgtctcgcaagtccaagcatctagcaaatcgaccactgaaagtaaagaaggaatcagcaggcaacgaaaggtgggggggagggaggttaagctcatgttcacttactagaggccttccagctcggttgcaattccactctctgagaaagaattgcgagagacctcaatcagcaacagttgggaagctaacccggagccgttcgttcggggatcttcgaggacgcgcatgatggggtcaatcttgtatacgccgacaagagctcaacaccttcatgtatgcaaggcatcgaagaaccgtatcgaccattatgtaccctcgagattgtaccgctcgtcgctttttcctccgaccatctcacaaaggaggtcggagagctcatctccgaaaggtagctgctgctgccacttggcggagttgagggcacgtatcccggcagatcgtcttgtccgctttccacttcgaactcaccagctgctttttgttgcgcctcctgtactcgagcatcccccgtcccagagcgaggtcgactggcgctcccagatatggaggctttggacaacccgctagcgagctccttctcgaccgcatccactccgaatggttcatcgattccattggctttgagctggccagtcacgaggtctcgttcactacgctcttctagcaggtcgatgttgctcgtcatgccaaggttcgcgttgccaaagctgcgccttgcaccttgccctacctcgtttccgttcctctcctcggctatcgcagcttcaggaagtacgagcgagcccgaaagactcccagactgcctgagtgtaccttcagactgctgggatcccgacatggaatgttgtcgcgaccagtggtgggaaagaaagacgccatcttgctgtaaacgtgcaaatgggtcagtcgggcctggcgagtgcaagcatgcgactgtcacgccacactgaccgccttcaacttctgcaattcgtggtagttgaagctaggcgactgccttgctcgaatggggatcggattgggagtgcttgaaccacttccatccaaacccggcgaagtcggagcagagtcgaaggggctctcgtcgtcttgaatttcgatatcgtcgtcgtccatctcgagaggagagtgaggcgaagggtactgatctccgccgcacatgtttactagcttactaaagagctacttcacgacagtctacctgcaacagatgatgtatcgtgcaaaatctgtcacgaagcggcatttcgactgtacaacttggtatctataggctatcagcgctacttgtagcttgcaggaaacctcctaaccggcaccgaccgaccgaccgaggactctcgaatcgaataaatttgcttccgtcatcgtcgagtgatcggatcacatgggccatgcccgagtcgccagtctccgcggccaagactccattcaagacatcttgtaacatatcaagacccagcgttctcgtacaacaggttcgtgactcgctattcctcctcctcctcttcctcgctacccgagtcagaagctgggtcgtcgatggctagcgctccaaacatgccgcccgatctgctctttggctgtaagagcgtctcgtcttcagaatcactgccctccgattcagtcggagcggtggcggactccgacgcggcctcgtgctcggccgtggtgccgtgatcggtagagcgctcgtcttgactctcatcctcttgatcttgctcttcgtcgaatcctacgtgccctgttgtcaagtctgtttgtagatgactcatatcgatccagaccccgttgacggaatcgattgtgctggccttgacgtcttgtgagaggaagcgccaagggatctttccttcggcgatcatcctcaatatctcgttccctgctcgattggtatcaggtcgaccagctttggcagtcactggaaaatgtagtctcctattaataatgtccaatttcgacgtcagacgaagtcggacttgccgtatccacggtgactagcccagccctgcatgatgtcgccagtagtccagtgcgggatgtagcctctatccctctccgcagctggcccacccagaccagctcgatatgtcttcttgctctccctcgtttcatgttctgccagctcttcgccccagcgctggggtgtcggaatgcgaaggatggtttcgatgggtagcaggcgactgcagtggtacatgcatgccggaatggatgggatttgcgagatcggtaggactaatgcaggcatagttgatgtcgtctgaatcagaaaccgaagggaatgcccgcagaaaaactctcagcttgactcacttccagacatgacctgaacctcgacgcttgtcagcgagggaaataccagtcccgggcaatccacgatcagcacatccgatgtccagtaaatggactggaaatgtttggtctttaataagatgaggtcctatcagttgggctcgcgacatgacccgaacgttggcctcacctttccaggcgttttcgaagctcgtactcttgatcgaccgagcagagcgttcagcagtgacgatttaccgttattgggttgcccaatcaatcccacagtcaaacaggtcgccagacgtgccgtcgccccactactctcggtgccttccagactctcgtgctcggggcccgtctcttcaacatcgcttgtggctccatcctcgagattatcgtcaatcggaggcagaggtcgctgctgtatatctccagcctgatacagctgctcccactcaatatctggcttgatacgggtatggcagtcccgagtccagcgagccacttttgccgagtcgccgttgagtgactcgggcggttgcaaaaggctggcatgagcacgtttgattgccgaaattagagcgtcaagtgatgactctgggatatgaggtatgtgtctcgagcgtttcacatcagctggcgataaaaggtaccgtcagcttgactcgagctagaatctggcgaggaatgtggctcacctgcttccctttgataactttccacgcagacgatctctggacagtcttccaaatctgtcatggggtcggttgagttcggtgcattgttgccgtatcgccaccacctcctgcaccatgctatccactcttgctgtcgctcggcttctacgaggtctgctttggtcagaaccagaacgacctttttacgaccggattgagcgaattttggctttttgctgcgagcttgttgctgtccctcggttatcacgtcaatcctatcgtcctggagaccgacaagatcccgtaggtaggcccgaagtgaagcaggaaagtgtacaggaggacaccgtatgtccatcaagacgagtatgacgttggactgctcgccgactcgccagagttgccgccatacttgtagatttctctcgtaaaccgatggcgatctcacctcgagcaccgcttctgctcgaaccaagacagttttggatgcctcgtcatcgctcgatccttcttcatcttcgtccaatcccgaatactcgtactgaacttcctcgatcgattgcaaccatttctcaaagtttccctcctcgttcttttcgagttcctttttggtgacaccgtacttccactttggccgtcgtggacagttcagtcgatcgtccagccgcctagcttttttgcgcttctcaggtgtctgctctcgctcgatggcagaacgatagagcatcaattcggtcgggatgggcctctctagtggttgttcgaatgctaccttctgagtgtgtgccaaatactcgggggatactgatagaaatttgaaccgggattgaagctctcgtgccttttgtcgggcgtcagggtcgatcgtcgcatcccgaatcgatctcgacaaatggtccttgactcccgtgttcttctttgcgaaactggccgctagcgttagctctcctcgtttgacggatcgtttctcctgcaactgagctgcgggattgaactcgttcggtcagggtcgctttgggcgtctcggtgagtcctgcaaacctacccttcttcgccttgttcgaagcggggacctttcttccgggcatctcggcaggtatacagcacggggacgttggtatggcgtgttttgatgtcttctggctggtttgaccttagtttctgccgctaatacaactgggtgttgctactggcaccacctgcgaatggtggatagatgactcgaaggccaggctcagaggtgtaaggtgcataaggtgtctcatcaaaggtagtttaccggaaaagttgcttctcaccgctcagcaggataattctcgatggatccgccagatcgattcgtcatcgcatgccgtaaatccggacccgggacctcaagaccatacggaatagattggctagcgtggtctctggatctctggggaactttccggccataatatcgatcggcgagtgtacagataggatatagatatatagatgacaatagcagctcgatggcacgcctgtatgctctagataggtaatgaagggtagagaaaaagaacaagccgttcccgatggatgcggtgcaagggtgaataggataccccaatcaagtggatcccatccgaaagtccctcgtcccgatcgccgggaaagcaacgcataggacgatgcgtggtcgtaaaatagttgagagccgaaagtcgcccatccgtggacatggtcagtcggacaaggtaaggtcgtcgtcgacgtttcgagtttgataataacgcgtcgattgatgcttcgtcgcaccgcagagtaaaaaccgtctatagttgattgtcgtcacaagcagaaaagtgtgtgtatgtgggttttgtggggttttcttattgggagcttttgtcaattcgtgacaagcaggtcatagacggtcgttaaggggtgtcccaagtgaggcggggaaagaacattgaagatgggggacgcgatggttccccccgagatcctttccgcccgaggcgggatagtgcgagacgcgttccaatccgtgaattattatagggttcgagatgatcttgcaaatgtagctgataagagtcttttcgtcgtcgtcgatggttgtgttgtcgtcataatgtccgtatggtccgtgtccttcgagtattgtcccatgcatcggaacccattcttgtcgtaaaaaagaggaggaaagagtgaatctgacctggagaaggaccagattgttgtgtatatgaaagcgtggcgtttgaccgagctaccagtcgagtcggtagaaatgaagagccgagaaattttggttttgggttttggtgcgaccggggtccagtcgcgttttcttcagacaagccgcagagtcgagaatagtcgagaggcggttgagagaccgtcggagagaacaaagggatcgaactctaccatccggctctcgaaagtaggctctttcgagtctaccaccaaccgctggaaccaccgccaccggcggctccgcctccgtatccaccgccgtaaccgccaccgaatccaccaccaccgccaagagacagcaacgccccttcgccctctccctgtctctctctcgatcgttccggtcattcctgtttgctcctgctgccatctgttccttgctacgctacgctgctgctacgcctcgtcccgccggcctctagctctcgctctctcactctctctcgcttttgccttgctagcaattgggtgagtggtggaagtggccgatgataatcaatcatcttggctcttcgccctcctgataagatctcccagacacccatccacacacgcacacacacccgaatcatcaaagacgacgacatcggtactcgtctctaccaccatcaccattactaatatcagagatcagatcctctctctcgtgtgtactcgcaacctttgcttggataagggtagcaaccagagtatccaatcttaattccctacgcggcaacaagggtcaagacgctgcgggacatcgtagcgccacttgctcacataatcaaagatcgtcaggatcgacccatccacctacggcctacgaatatctctaccaccgacgggaaaaaagaccgcggtcgaaaacagacgcactacctatatcgatacgacaagacgtacaggttcgacattgcgttcctagtacgacattgcatgatataagcgggaaaaaagacgggatcgacgtcacggatatcccgccacacggcctacagcaaagtaggacaaccacgctcgttcccccgaccttcttgtccaccagtcgtacacctcctcttctggacgtatcgagaggcgggaacgtcaacacatacacacgcgcacgcacatagatagattcatccgagatatagactcggaggagatcgtcagaaggaagaggatacaaggaggatggccgtcgtcgagtcgatttctgaccgaccgaggtctaggtccaagtccgacgcccggtcaagatcaagatcaagatcaagatcgaggtcgaggtccagatctagaggaggtagtcccgctcggaatagagatcggtcacccgtcaggtcgagcgtgaaccctagcgtcaatgatcggcatagcgtcacgcagcgcgagagggacgaagagacaagagggttgagcgggggtggggtcgggacgtcttcggtgggcaagttggtggatggaccgctccgaggaggtagcccggggagggagagggatggtcgtggtgagtcacaaatccggacatcttctagctgcgaccatgagagctggttcgagatcttggttcatggatccgatcataggagatacccgtcccagcccgttttctcaccggtctgcctcgttctttcccggttcacatcattcgcatctctcatccgacatcaacagctattcgacgacaagagacaagtcgtacgcctcgcccggtccagcttcgggatcgggatcgtccaacccagctcgaccgagcttgttgaacgggtatcaacacccggtctcgacctcccgtggaacatatgcggatagcccacctcagagtcccgtcgagagaggtggatcgccggacagggacgtcggaccaagatcgtccgctggagtcgcggggaacgggaacggacatgctctatccctgccccatctggaacgatcgcacggtatactgggagagtctaggcagttgccatcgttgcccgcccagcgaaacgggcaggactcgaacggacgggcctcggggatctcgttgccacccatcggagcggccttgacgccgagggggacgatgctcttgccctcgcggagccgagatcgacccagcccgatccccttggcggacgcgagagcctctcctagggattccacgccccattcgatctcggggatcgaacgggccgcgtccgtcaggcgggacagagcgagggaagtgacaagaccggactctccgccccccgtcggttcttgcccgggggacgggaggtgtaacggcacaggcggcaagatgggctgtgaaggttgtccgacgtataacaacagttcgagcaaggtcgttctcgatgggcaacagacgcaagcggctggcacgtgtgcaggttcggctcggagacagcagcagcagcaggaacaagcagcccgggagaaatatgcgatgacccgtggaggaagcccgatggaaggggtcgaaccggggtacaacccgttgatcgcggccagtcacgctcagaacggggcagggaaggcatcggtccggtcaccggggagtaagagcgcgaggtacaccgacgaggaaggtcagtcgaggcgtgattgggacatgatttcacggaccacttcatactaaattcccactcgaaatgtagctcgatccccatcagcagcgtctcctcaagcgggctctcgcggcatccccgatcagaacggtggtcgactgcgtgcgggaagcgatggacaggacagtcctcatgcgggcatgacgacgttgccactcgtcagtccggcgaacggtgcggtgcctatcggcatgagttgccggaattgcgggacgagcacgacaccgctctggagacgagacgacgagggtcgaccgcaatgcaatgcttgtggtgagtggaaccgcccacacgagattggagtggtcgagtcctgacggtcgccgattcgaacgatctaggtctgtatcacaaattgcacggcgtacctcgacctgtggccatgaaaaagaccgtcatcaaacggaggaaacgtgtcccggccgtgacgtctcgtggttctgctggacccgtaggcgagttggatgagccataccctccagtctcgcaagccgtaaccgagagcaagggcgcaaccacgcccgtcaccaagccgaaacggggccgcaagtcggcggctgcgtctaaaaccgcgtccgctgcgccatctccacccgaatctaccttttcgcgtggaggcgacatcgacatggacgtcgatgctgccgaagccgaacgcgccgccgaagaaggagtatgtcgacggccaacccctgctacgtcccggcaccacttactgacctcgtccggacattcccaatcccaggccgcccatcaactcgccgctgaaacgttgctctcgatcggacccaacagcaggtcgtccgctacggccgctcccgtcgatagaccagctagttccgcttcgacaagccgcgttgtcgaagagtctgcctcgaaacaactcgacaatcgggggctgaagcgcaaaaacatcgaggatgcggtcgcacaaaaggccagggcgaacgccgaggactcgcccaagcgtcgagcgttgagcccggatcgtacacgtgaatcgggagattctcagcttcctgctaggggctatcatgggcctcgacctcggccttactcctattatggatccgatgaggaacacgaatttgcaaaactcaccaccgacgagcagcgtcatagacggctcatggattggcatcacatgcgttctcagcaaaagaaggccgaggatgagatgaggatgcaggagcacatcgagatggaaaaggagcggatgcgaggggcaggacgggagcgcgagcaaagggaacgagatcgtcgtctcggcacggctgggctgacaaacggcacatccatcggtgtcggaagcgacgttgccaacgctgctcgtggcgaaaacagaaactcgatccccggcgccggatatgcaggtgccggctcgggtgctcggccttcgccttatcgttacggggggtccatctttgacaatgatcggtatggttacggccgtcctatggataggaccaaagactcgacctcggcactcctctcatcgaatcgccctgcctcctgggtcaacccgctcgtcgcatcccgatcacgacccggcagtccgtccggctcacccgcccaatccaaagcttcacccactgtgaatgcgttgacccgcaaggaattgcaagatcaccgcgattccctcttggagggtaaaaagtggctggaagaacgcctgagcaagacggagagactgctcgggcaactcaacgaaaagctcgccgagcctccaattgccgcccatgcacctgctagtcgacccacgtcgtcccacgcgcccggacctaccacatcagtctcgggcacgctggtctcgaaggaagacgaggctgtacgagctcgacaggctagggagcgggaactcgtcaacggtcgacgggccgggtatggcggtctaggtttcggaggaggcggtctgttgggaggtggtggtggttacggaagtccgtacggcggcggtctgggtctgttgaggatgagcgagtgggattcttggtcccgggacaagcatctcagggaaagagaacgcgagaaccgggaaaaggaagccgagaggttgcgacaggacatcaaggacaaggccgagcgggaaaagacgaacgggcccactaccggagctacagctgctaccaacacgaccagctcatccacgccgactgtcgcgtcgactgccagtccttctgctatggagaggaagcctgtcgtggccccgctgggaacaagctcgttcgcgcttgcccggagaaaggagctgggtggaggcttgttcgggcacggatcgagttggtccatgacatgaggcgagaccgattctcgtagaacaaagaaatgaatacatgcagccttcgaggctgctctcgctttacaccgttctgtcccgtctcgaagactgatacaacttgtccgaccccgatactggtgtgtgtatgtagattctgatacaggcgcgtgggtttacgaatccaggggttgaccgaaatgtcgtccgcctgtgcccggcacgccgacgctgtgtttcaacccatcccctgcttgacggttgctagcggtcaagccttcgttggcattctgactatttgcttcttccggctagaaagggaaagggggtatcagcgttaggcttcgaggctcgtctgcactagacaagggccaaattgtttactttttgctctctgataagatgatcgaagttctgcaaagcacgccgtactctcggtcagatgatgttggacgacgaatgtcctcggtacgtagagactgaccccccaaagatcagccacagtctggaattctttgccgacgccgagcacttcttccagctttcgattgaggttgttgctcgagttgagaagttgttcaaacccctgatcgatggatgcggaatcagttccagcgactctatctaaacgaacatgaactgtctgcgctcacaccagagatatcgtcaatcaacctagccttctccctctcaaagtaggtgagaccgtcgttctcctgagcaccttgtccgacgacgctcgcgcccgctgcgttccggtaccctccagcggtgttggtagcgacgaatgtaggggccgaagccgccattgattttctggaattcatcatggttgccgtgtaccttgactagttggctatgtttgtgatttgaatggactcggttgaatgtgaataggatgagatatggttgtggattgaacgggggatgttgaccgaggttgatcgatcatgtggtcgtcgacttgtttgagccgagactcgacgctggctgttgtttagtttgtcaacctctgaacttgaccttgtcaacaaaccgattcgacactcactgaccactcatcttcatcagagacgtcgtcgtacatgataacaatcccacaccactcgactaaacaactcgagcgcctagatcgaatccgccatggtcacccaaccctcatcccaaaagaccaggcactacgcgatgctcgcgtccaggatcaaacagctccagggtgaactcgccgtcaccgaacaatgcatgggggaaatgtctaaacagctcgaaagcatggccaagctcggagcttattgcggatcacagtgagtgtctctttttctttttctttgacgatcaggttcgatatcgtgtgacgggacgagctgacgagcgatcgacgtacaggttcatggcggcttcccgtctcctcgatgtcgacctcgaggcacaaacgcaggccagggaaaaccagacggggaacgaaacgcggtcttgaagcgttgggaatgcagcaatggaggtggataaaacggatggattcggcaaggcggacgggagtcaagtcgggcgaaagccaagctcgtatcaccgagcgatgggacaccccggcacacaaaactgtatcatcaagactgtcggttgtatatatctcggtaatacctcgcaacacgagaattggtgactagatgcacaaacactacaccgatcattgcgcgcccataagagcgtctatgacacactgctcgtcctaatctctatttgctggcagaccgatcgctgggtttagtacgatttcttcttgatcttcttgaccggtgtcgatggctcggcagcagcagcaacccttttaacttctacaatcacaagatcacgattcttgtcagaacgattcgatgtggtcggctcgtccacgacgcgaggcgattccgcactgacctggtcgttccaacggcggactggaagtgatcccaccaaagttgtagacagcccgcagagcgaacaacacggtcaacacgaccgcacagaaagccctagcatcgagcttgtcccacggggcgaacgtcacggtggtctgcaggtgttctccggggttcgatgactttgtcaaaccgagtccggggacgaccgaaaccaagatggcgtacgggaggaggaagaccgggtgggcgtgcgtcaaggctccgtaaagccaggcgatgaccggtggagcccagaaatcgacggctttccacccatcgggcttcatctcccccggagtggaaaagtgccattccttttcaaagagaccgaatgcgaacgccgcagaggccgaggggacgaccatgatccatgacgaaaggaccatgaggtaagggtttgtcgagatgagaggatccttgtgagaccggatcagatcaaaggagaaggtggtaaggacaagagctcgcccgagcgagtcgtgtggagatagaggtagctcgtgtgagagtaacggtttgcgaggaaccaggcggtgtagagatgtccgagaaatcaggtagtctaggattcgaccgaggaagaggtcagtttcgaaagttctatttgccatctctgcaacacatacgcatgccacagaaaaggacgagaccgtttggagattgcatccaagacggtaggacaccgaggaaagcagccaagaaggtctctccgccaaagaccaatacggcgatcgcgaaggcctcttgcaggtacgtagggcggcgtccagcttcatcaatcttgtcatctgggattctcgccttgcctcggacgtattggtcgacaaaaacgctcaagcgaattgctcccaataggtcgagaatgggaaagggtaggtaggtcgtatgcgggatcgtctgaaagaggtaaagctgggtgtctctataccaagatactagttgcgatgacatggcgggcagggcggttggacggatggctatgtttcactgcggctggaagctgtcgagcaggtaccgacgtgtcgtcctcttaatactcgagagtaactcaggaattatattcacgtcaaccacggacctggctggcgaaatcaaggagtatttgcctacacgttgtgcgtgaatcgtcatcttcacgacttggttcaatgacgatctcgccaatctcggaagcagaaaggatgttcccgggtaaacctttgttcgacagcgctgggccatcgttgcacttggaatgcatcatgatttgcatgacatgcttgcccggaaagtcgctatacagctatacaacgtgttgatgagtgtgtctgaaaatataactgcgtgatctcgtgtctgttcagtacaggatcgtgatctatgggatgttcgtcgtcatgattcgccctcgactcattcctgagcttggtatttcttgcgaaggtcggaaatgtcttgccgcaaccgtctgatgctgacgggctgcgaagggaagcgcaaaaacgtggtcaatttcgaggcttaggatatacgcaggaacagccgctcacctttgtgatccactcatcaataccggctctgtgaaagtgcgagtatgccgtcagcgcgcccgaataactcgcttatgacgtcgatcctcactcgatcaaccctctctgttcattcaagggtccctggagagctgtcactgcgacaattttgcatcgtggccatttcatctcttgctcataagctcggatggcgatcgcagcctcgaaaccattttttcgaggcatgttgatgtcgagcaacactgcagattccgatggtcgtgattagctggcgtttccaggtgacagaacgaacgcgtcgagatgacctaccgagacctggtttgaatatggtatattcagatataccatcctcgccgtccaccgcttcagccacgtgaatacccattttctaaaagcatattatagagcctgagccggacgcttcttgtcggttcacaaacggaaactttgggtgctcaccttgagcgctcctacaagtagtcggcggtttacctgaggtcacggaaagtcaagtcagtcttttgtacgatagcaattgggattttcagtggcactcacgacattgtcctcaacgaccaacactgagagcacatggatgtcagtcaattcgagctcgggaggacgcaagattccaccagatgagaccgacctttgaaagccgcctgcatacccgtatccgctgaatcgttcctgccctctctcgcggtcgcgtccggaagatactggctcgtgcccctgcgctccgccagtagcggccgcttgtgctttagatccggaatattggggtcgctcatcgatggttcccctaatcgcgattgaggctgcgcttccctggccttttgttctggttcactgtcagactcagttgtagtggtatcggggttgatcatttggtttcttttgctctcggcattctgtgctgcggccgcagagtcccagcaccgagcgcgagttgcggacaagatttgatcgacgaccgaaggcaatagcggtcgaaagatccagcggaccggaacctcctcgccgcacagcctcaaagatttgggcggactgcttcgctttggcgatgtcgcagcaccgaataacacaatctgcttgtcgtgcgagctagtaaaggccaagagctcgctctcgtacggtctcagatcgcattgctcctcaatcaggattgcatccgcttccgatagaatgcgaaccaccgagcattgagacacccggagttggcgcttcaggctggccgccatgtgggacaaagctagaccgtctttgcttttgaaacccatcaggtggagtcgtacctcggtagaatccgtctcttccgcactagagttctcggttccttcagtgtcgatagacagaggtacctcaatcttgactgatgtgcccgatcctgccgcgctttggaatacgatcgatccccccatgagttcgatcatccttgacgcgagtgggactccgagaccagctcctttctgttaaagggaaacgacgtttagtccggaacaatagcagtgacggctgcggaagatcaaatagacgtaccgcatgaacgttggccttggcaaagggtttgaagatgtggttatcgacgaagtcctgctccataccaattccactatcttcgattgtgattgctaccatggtagtcggcatggctgattgatagcctcgcggcgcgtgagttttctgcaacggaacattcaatcagttctcaagactagatcatccatactttgaaaagcgcatttactcgagagatatcttcacagatcacagcgatatatccccgaggtgtacactgaaaagcattactgaggagctttaacacggccctacaattctcggcacaaaagattaggtcagcatgacatcgttccgatatctgtcggtagccacaaacaaacctctgtaaaggcagcttgtctcggtcaagcttccacgagccagtctcgcgcggcatgatctcgagatacacttccaggtcgtccatactgtctccggaaacaccgcgcgtcctggcttccatatcccaggcttcttgaaggacctcggacagtactccttccatcggctcggccaccttctgcggtcctttcttggtcaagtctcgttcctcagcatgctcgccacccacatccaaaaagtcgaggacgtcgttgagaagagagtcgagcgttcggccactcgaatccaatgtgtcgcagagctctccaatttcctgcttaaggtcccgcgatatgacaggttcggcattgtcgaccgggatggactgattagcaaggtcccgtaggagggccgtactggccagcatttctgatattggaatgcgtgatcagccagagtgtctttcacgccttgcgatctcagcgacgtacgatgcataggagttctgagctcgtgattggcgaggctcgcaaataatcgctataagtcgtcgaaagtcaatcggatgtccatatacgaagagtaagaatacccacttgtgactgctcgaccgccgccatccgactgcgttggctagtagccatcaacgtaccgcagatcgactcgctaaagccgtcgaaaagagattagctgttttccccgcgtcgagatggggcaagcgccgcttacacgaaactgagtgcggaggaattataagtatagaggtcatccgtccagcatgcgacaaagacgaaggcacactggccctcatagtcgaagattggcatggctagcatccttatcgacgtgagctgggttctgcggccaacaagatcctcgagagcaaaccggactgacctagactacaagcagtaccaggcggcatcaccgcgttgatgctattcgcaatggcctaatcgcgcaccaatggggtttagcttcggcactgggacatgcgatcaacaaccttgagggctcaccttggaatcatccctctcgaaccaagtcttacgtgacttgaggttgagcgagatgaattcggcgaccacccgcttagcttccggtgactgaaacgagaattgcatggtatcgtccgacatggaagaacccagcatcttgatctgttggccctttggacgggttccggtcaatgcaacggtgttaacggatatttacttcgattggctcgcacagctgaccttttcatcgtcgacgccccattcgtccttatgcaacgcttcgttctgccgtcgcctagggacgaattgtaccgtaggcgccagggatcttggcatcaagctaaccaagtttctagccgtccggcgatcgccaccgttaagacccagaaaagatccgtcggacgagtaacctccgagactcgagttgtcgtcccacgaggtactacctgtacccgaactcgttgcggctccggatgaactgtccctggcggaaccggccgaattgatcggatagaaaacgtggaaattggaggcatctacgacagcgcaagcattggcgtgtaaggtttcgcgcacgattctacaagcctcttgaaagagatccagactggaaccatcgtcgtcatcctcttcagcgattgaggttcgatcctggacgttgccagcagcgacggctgccgttcttgcctttcgccggaattcgcgccgtgaccctgtcccagtttgcagtgattgcctcaggaagtcaacagtgacttgatgcatcgactgttgctgctggttctccgagacttggtacatctgctcgagctcagctacgacgcatccagcgagatccgccatgaccgccttcgtccggtcgtcgaagtcgggccgaggcttcatatcgatcacacagaatgatccaatcgtgaccggggactttcccctcgtgacgataaggggcgcaccgcaataggcttggatcgggcccgaactgccacaaaccatgggatggttcgcgaatctccagtcctttccaacgtccgagactagcatgcattcgccggcggacaaagccgtatgtgtgcaaaggccgaggtcggtatccatctcgtgttgcccgagaccgatttccgagacgaagagctggttatgcttcccaatgatagtcacggccgcaatcttgacgttgaagacggaacaagcgagtcgtgtaaacttgtcgagcgtctctcgccttataggctggcccggtctatccagacccaatcgtcggatcatcctcaatcttcgtctgacaccttccggagcttgctttggcgcacagagaaacccgttcttctggaaaaactctctgacccgatcagtttcattctccctagctgcacccatatcgatgactggtaagcccgaatttgacgcgagggactgttgggagtccagagctgacgaggaggccgttgcgttcctcgatccggcagagtcggtactctgagtgccacgaccttctttcaagtctcccggatgcaacggattgatgcccggccggtgcgccgtactggtcggcggtcggagccggtgtaccggacccttcccagtcaaggggactttctgtaccgggtcccctttgacggtcgaagcaaactctgacgcgtccgcactcgattgcatcaaggttgcggacgaacgagaggatgtcgctattggtatggcagtagattgtcccttttcgccatttcccagggctttttccgaatcagcagaattgccggagtcatccccgtcttcgccgatgatcttgagcctggtcgcattggcttggccgagcgcctgagcgagggtgttctcgtctgctgcacgggctcgctcgcgtttagaggacttgcccttgttcttagatggcaaatgggtttcctggccagcaacgatattgggtatctcggggtcctggttgtccccctcttgatcggaaccacgaggagacattgaagggaactggacgtcctcacgtagcggcgtatctggtccggcaggtctgggacctgattgtccagtttgggccatggtatgcttatcgctatgcaccgagaagagctgctctaccaaggacggtgttctcgtaccggccgtctcttcacgcccgcctcgttcgattgtttcgaagtgtggtattggcgaacgaacagggagattggtcggtgtgccgtcttcctgatctgtcggacgatcagcgagagatgtggcactctgctccgcctgtgaggcatcgatggggtccagagtaatgatagtaggctgcgatgcatcctgcttgaagagcttcggttccagcatgaggctatcatcgcgatagctaaaatggaccgatacgaacagtttcacaatccgatcaataaaagtctagattccagtcatcgaattactaacctcttgatgaaggtctcccactctgctttcgtcgtcggaggtgagattctaccggaatcggaatctacgatcgaattcctcctctgcattctctctagctcctctttaacatcattcatgtgaggtagcctcgactcctgatcatcaagcagaatatcagagggtcgttgacgggtcgaactccggctcgacgaggtgctggtcgaacgagtctcgtcgtgcatgtccatattaatgtcgggtatgccaagagctgtagccatctttgcaggcgacaggaatcaatcccgcaagattaaatctcgaagccaggacgacgagaacggttcgaagagagaggttgagcgtgtgcgatgtcgtgttgacgagtttaccgacccatgttatcgaaagaaaggtcaagagcgaggcagccagagacgccgatgaggttcgagcagaatctatctcgtggtactatttgcgagcagcgtcaagggtgcgagccgatgatcaagaaagcaaaatagatggatagatgtggttgcaggatgtcatagctctcggttctctcacgagattgtcgatcgagaacgacgctgccccccttttgccggaatcaacccaaccacgcgctacgagacgattcacacaagagatgactttccgcatcttttctcgttcgacacacccggcagtcatgggtagctgggtcagaggatgacaagtctggaccaagagctatgactgcgtccagttctgatggtgtaacgtcaggtctgccagaaaacggtgccacctcgtaaagctcgcaagagcttcggtgatcgcgtagcctccattttcatttacttgcaaactgtcgcgtctgtcagactcgcctgggccatggttcgatgacctagggacaagaccgctgatagcgatctgtcatgatctatcaagcatgccagatacacctctgaaccatactgttctacaggcgtgccatatttccagcagcacaagcttcggcaaccgaccttgtcccgccatcatcgacgtcgtcaccgcaaaccgagagcggaagtaatccatcgagtgagcgcgcgagattggcatgacgtcgctcaatcgggtccgagctgctttctgccatacgccatatgcgacttgccaatggttttgcacggtttcagcaccaacatcttcggcgtgagctgcggagcgctgttctcgggaaccgaatatcacccacttgcccatagccatacgtaagcacgaagcgatgattctaaacgggcattccggttctcggacagggtgacatcgcttcgtctacacgcaaaatggattagctcgcgcccggctgtccagctgctcgtctagcgtccggttttggttgggctctttcctcgtaaaaaaaaaaaaaaaaagacctcgccgcggcccgtttcaggacatcgtttcatcgtttcgtgcttgagtctggtgtgatttgacgttatgtcggaggacagcatgatgtatcagaccgtcaggtaaactcggttggcaagcgatgtgtatgtttcccgacgaggcagatatcattgacagtcttcttccgtatgacgtgaagattccctgagcaggggcttgcactacgcgtaaagcttcccgacgtcatattttgtggtatgcgtcgatagtcggcgagcgactaaccaagaggagtcctgctgtgggatcttacgtccttgacgatacaagccatgcagccgtctgaacggatcggatcgcccgtcgcgacctcgaccaagcggtggaggctttcagcatatctggcaggattgcgaagcgcaataaatgtgcgaatatcgaatatcgtgttcgcactgctacattcgctactcgtcaaaaatcaaaagcagcctgagaccttccagcggttgaaagttcttgcatgccttaccgtccggcgcgaagctaccgggtcgttgttctgtcgcgcgggaggacgggctttgatacgaggatgagacgttcggtcaagggcgatctgcgcagtatcgttcgtcagaagaagaaaaggctcaaaggtatgtacatgcctgatgagaccatcgtaccttcaaaatggtgaaaaacccggtgacccagacacatgtcggtctctcgactcccacttgttacatctcgatgaccgctccagggtcaattctggtaacacatcctgagagttccagtcgtacaacctgtcagagccttaatctcggtacctgaagccaggaacagatcgactgatttcctctgcatggagatccgagcccgtacgcaggcggtacaccgctcgcgcatatgaagtaccagtatacatgccttctgcgtcgtctacccctctcgactggaccttttagctttcctcgtatgcatggattacggatcgatccggctcttgacgtctggccctcgtcgacgtgacgtattcgttggctctttaccgtccgtctacaaacccttcgacgaccttcctcctcctgtatcgatcgatctgatctggtagaaatttgcgacaagatatagaggatggatgtagggatataccacccgaggccacgagcacgtagaccctaatgcagttgacatccatatatatatgtatcggtccgagcatgcctgatcctaccatctctcacattgtgtgatgcggatccgattgagagccaggatacgacgatcacgtcgtcacccatcaatatgataccgactgggatggtcaggaaatcaaaaaaggtcaccctacactacccgccggatggatgtcaaatcgacgagagggtcggatcacaatcccaaaccgctgaaccacccggtataagagggctcgccgttcacccggccggaacgtccattcctgatgatcgatgatcgtgctttagcaaagcgattaaagggcactcgaccgggcgtacacgtcggattggctggataaccatcggaaagtaggcaaggtttcatcggacgacctttgccctcagtgagggatgaagaagagacctctagattggcaagcgggggaggggggtttgcgatcgatggaaatttggtcgcaaaacggcagaggcagaggcaaggtcacgttcttggtcaacactaggtggcgcgacgctggtacgtatgtacgatcgcccggacctgacccggatagaaaagaatagaagagaagtgcgagcccatccaagcgactcaattcatgggctcgatgatgatctcgtacgaagatgccgtcgggaagatggcgtggcttgaagtcgtcgacacatctctagcgagatgaaacgagagttggctgaccgtaggggcgacgcgcaagtgatcgttcaaagtggaggttgagcgatgaacgatcttgaatttgaaatggttcgttcgctcgtgcgcgggtgggtaagcgcgacttggggggtgccaaagcgaggtttgcgcttttaagaggttttcaactattctctcactcactctctcaccatctctcgcgcggtttgcctaagcattcgttccggcctcagcctcagcttcagccctaccacccaccaagcgagcgagcgagtgagcgaccggggcgaccgagtcgtgactctctcgagaggttttgcaccagtcacgccggaccaggacctgtgtgtgatcgtgatctctcgtagatcgaccccaaactcgtcgcaattttactcacacacccgtgatacccactccgtacgttcgcctcgttcggtccaagaagaaaccaaaaaaggtcagttgctcccccggacaccttgctatcacactacctagactcacccgtatcctctctttgcgcacgcctctcagtcgacatccagcaaaaatggccgctcgtcccactgtcaccgtctacgccgcctcgggagaggcctccgggtctttggctttgccctcggttttcaccgctcccatcaggttggacgtcgtccagcaggttcacagtgagtatcgatcggccggaatcggacgggggaaaagggggcatcggggaggatttcgagggcatcagaggaacgaggacgaggacgacggcgacttggagtggataatggttcgagcgggggagccggataacagggagatgaagctggacgtgcaagggacaataggacaagcaggaagatgccttgcgacgcttgcttagtttgcggaaccacatcaggacaagaccatctcacggtcttcaaggcagacgatctatcaagacaccctcgaaatcctctacggccccgtcctctactcatccccgaatcacccccacccccactctcgaacttgtcgaactgatcacctcatcaaccttttttttcccgcccaccctagagtcgatgaacaagaaccgtcgtcaggcctacggagtcgccgagaacgccggtcaccagcactcggccgaatcttggggtaccggtcgtgccgtcgcccgtatcccccgtatcgccggtagcggtaccgccagggccggacagggagctttcggaaacatgtgcaggggaggaaggatgttcgctcctaccaagactttcaggaagtggcacgtcaaggtgagtcgacgcagacgacaggcgaggcgatggacggcaggctgatcgtctgttcggaatgaccactttgtagatcaaccaaaaccagcgacgatacgccgtcgcctcggctttggctgcttctgccctcccctcgttggtcctcgcccgtggacaccgagtcgagcagatccaagaggttcccctcgtcctcgccgactcggccgagtcgctcaaaaagaccaaggaggccgtcgagctcttgaagaccgtcaaggcctactcggacattgtcaaggtctccaactcgaggaagatcagggccggaaagggaaagatgaggaacaggaggcacaggcagaggcgtggacctttggtcgtttacaagaacgacgagggtatcgtcaaggccctcaggaacattcctggtgtcgagacctgccccgtctcggccttgaacttgttgcagttggcccccggtggtcacgtcggcaggttcgtcatctggaccgagggtgctttcggcgctttggacgaggtctacgctgccaagtctggttacgagtgagtccactccctggcgtcatccgcgtggtttcgcaagagacttcgctcatgcttgatggttgccccgccccccctccttatcaggctccccaccgccaagatctcgtcttccgacgtcacccgactcatcaactctgacgagatccagtcgatcgtccgagctggtggtgcccccacccagaagagtgagtccgggtcggcctgtcaagttgtccaaagtggaactctcgcgctgaccatgccattgaatcattctcgtctcaccagggcccttctcccagaagaagaaccctctcaagaacaaggccgtcttgttcaggctcaacccttacgccaagactttgcgtcgtcaggagttgatcaggtccgagaagaagggtaccggcaagaaggccgccgctggcaaggctgccggcgaggaattcttgaagaccttgcacgctgcttgagcgggtcgataatgcaaaggactcgggaggtggagatggtccgtcgaagtgtgacaccgacctgttgaccggccttgcgtcgggaagagggagcaacgtccgtcgggggagcagctcgcccatgggtccgagcgttatgagattcgttgttttgcatcgtgtggcctgttttcttatgtgtattgacggaatagtcttatgagaatgacattcgtcgcacgaaaccagcggggcagagggtagagaggatcaggtcggccctgttccaatgctacacgggtgtttgggattgaatgctacgaccgtgtcaaaagggtcaggccgacgcgtctcgcggtcagatggatgttcgcgattcatcatctttcacgattcgagtgactgacgaggtgggattgaccgacgtgacatcgatcaagacgtatgtaataatatttatcacagatcctggacaacctcagcctatcatatagaacaagggatgaactagatcagggacgatgaaatcccgccaatcccccttgacgatcctcgtgatcgcctgtctcctgctcgtcacctatctcgtctcgcccgtccatgccgtccagaaatccctcgccggcaagatcgattggcacaagtcgttgatcggagtacctcgacaggaccttacacctgcgttcatcagtctacttgaaggcaaggatggactcgtcttggtgaccgagcgcaacgtcctcgccgtcctggatgccggggatgggcaggtcgtttggaggcagatgctagagccggaagatgtcgtcgtgagctacgagatcagtgcggatggtcagtttcttgcaacgcagggtcaagacggattggagtctagagactcatctcttcaattcgtcgatgttacagccatcgtcgtcatctctggattggagacgcccatgatccgctcattctcgttgtcgagcgggcatgttcagtgggaaacgctactcgggtcgactacaggccaagcgcctcaacaactttatgagcctctcgacctcggtaccaagatcatctctaacggtaaaggcgatgtgatcgtcttgtctcgaggtcacgtcgtcaacaggttggacggcaccacgggaggggtcaagtggacctggaccctggacgagaatgtaaccggctcgaccctggtcgatgtcgtcgacagcccagatgggttgacagttatctccatgatccagtcgttcgcttccccccagctggctatgaccaagttgaacatcgataccggcagcgtcgtcgagcagaccaagcctgtcaagatcaacctcgactcgcccaaggactatatagttaccgaatctaccaatatccactggatcgatgcacagtcaaaacaaatcaagagcgcctcgctcgccaacgtagacaagcagactctgagtgggttgaagggcgagtatcacaaaattcacgatattggcctgtcgaaatccggtcggtttgcggctcaacatgcggacggctcggaacacgtgatcaccaagcacgagaagaaaccgctcgagctcaccgccttcaagactagctctgggcaaacgaatttgtggcaaaagggctcgaccggtggtcagatcgtgcaaggcgccttcaccgagaccggtttccaggtcagtgaccggttccttttcgagcttgatcctcgtcatagagctgaggccacgctttgcaacgcaggtgatggtatacgaccacaaggatattgctaaagtgacgattcacaacgaaatcaagcatgacgcagcacatggcaaaatagtcggcgtgagctcagctcgtcattgatgattgtctcagcaatcgctcgctgatacgattgtataccaatctacaggccattaccgcaccaaaatcggagaacagcttgacgatcatcctcacctcgaccggcagcattcaaggctgggtacagggttcagagggtcctcgcatggtgtggacgcgagaagagtccttgagcgacatcaaggcgcatgtcgtcgttgacctacccgagagaaaggtcgagcagactggagcggtcctcgatcaagagggattcgtctccaggatagccagacatatcaaggaattgaacgtgagacgccggtgcagcgaggtccaggtcgtggttcgcagctgactttgatcgttgcagtacctgcccagctacgcctcgagcctcgtcagccgattcacgagcggtagctacaccaaatccttgtcgtccacgccccttgaaactggcaacctttttagagatcaattcggctttcaaaagctcgtcatcctcgccaccaccaagggtcaggtgcatgccgtcgattctgctcatgggaacatcgtatggaaagcttcactctcaaccgaatcgtccgacctggacgtcgtcgacatgtgggttgtgcgaagtgcgcccgaatttggtgctcctgtagtagccatcgtcgccaacaagctggatgctggagtgcgtaacaactcgtcggcccaatatcgccgacacgtcgctgaccaaaatctttcggttgcgcgcagaaaacgtctaccgttgcgtaccacatcgatgcctttaccgggaggtcgattcaatcgcaagacttgacgggcggcctcactgccaagctcattgcggatggcccggtcgcccgtgccttccctatccctgtcgaccattgcaagacgcatatccaggccgtcgctattgtcgctcaagatacacacgtaggttccgtcgttcgacctatagagcggatatgcgttgctgacgcggtacgtttcacaggtccacttctttccttcatgcaacaagatcaaggctggtttcggcaacatctcgtcccagacctttttccactcgacagagaccaagcttgctcacacctcgatacgaggctttgccatcgcgagcccagagcataacgcattcttcacttatcctacatgggccctaccccttgctgacgacgaggccatcgtcaatgtggctgaacttcaacaaggagtcgtcgccgcttatggtcgagtgcttggcgatcgcacgactctttacaaatacctgaaccctcatcttgtagccttcgctaccgtcagcaagtccaagggggcaggtgccgtatacgtcgtcgataccactagcggtgccattgtgcacgaagcgagaatccccgacgtcgacgtccggaccggaattcaaatcatcctggccgagaactggttggtctactcttatgccgagaacgaagtgcctggcaagtcgagtcgcggacagaggatcgtgtcgacggaacttttcgagggcgccttcccggacgagaggaccgactcgtgagcagacacgacagatattgccgttctcgcgatcatggctgatcagttgctggatagtatctcggcctcgaccctcacgaccacaccaaacgttcacgctattgctcgtaccttcttggtcccagttgggatcaagggtctgagcatgacgacttccatgcacgggatcacgtacaaggaccttatccgtaagtcctggctgcaaataggacatgatgtccttggacctcatttcttttcccacctgacagtcgtaaccgaccgggaccaactcgtggctgttcccaagaggatgttggaccctcggaggcccgacgttccttcgaagcgagacaaggaagagtttttagtgccttaccagcccatgctgttccttgacccgaaatggaccatctcccatacatacgacgtgagtccatttggatgatctcgataagcgaccgttcactgatatcctttcttgtgacgacaacaaggtcgcgggcatcaacagggtgatcaccaccccatcgttgctcgaatcgacttccctgatcattacgacaggcctcgacctgttcgggactcgagcgacgccgtctggaactttcgacattctcagtgattactttaacaagacgcaactgatgctgactatcctcggattgggtatcggaatcactgttgccagacctgccgtcacccgaaaagtgctcaaggcacgttggtactgagtggagtatagatgttcgggtggctcttgctgtttgtaacgatagaacttgcataggagacctttggcacgatgcattggctttgaaaggatgcgatcttgtcagaacgttgagacaatcgccaggctgtcggtctgacgatggcgcttcctttgtccaacaaccagggggctccaaacagctactctagatatctcaaagaagcaagtctataaaaaagtctgactctcgaggggcaaccatccctttatatgcatatgggagacaccttactgccccccccagaggattttcccttgcctacccgcgtctcccgaaacgatcatcgagatggatcatgaacaagccggtccgagtcgcccgcggcaacaagccatcgaatcgcaagaacgagaacttgaagtagatctcgacttgcaggccctgtccttcctcttttcctcgggtcattacgatgacgagaaactgtctgcacctgctattgtcaatcaggaagtgaatggcttgtttgaagatttggctcagatgcacggtttgttgatcacgatgaaggcctcgccggctgcggatatcatgggcgggttcgcgagcgcgtacgaggcggtggatcatgcgatatttcgagtaggaggcattctgccggtgctggagactgatgttgctgatgcgttgaagcggtcattgggagagttgcgtgagtcgatcacggtcacgatgatgtgataccttttagcagtgtctgatgacaaatttccgtttgccactcgaaaacaggccgtggcatattggccctcgaaggtgatgactattcctgtttatgcgttctagcagcgttgagactgaaacccattgagaatcacaaatcgacagagaacctcgaaagtgacgaagacaagactttcgtgatcgacatgatcgctgctctgccagagttggacgacggcgtaagtctttgccatccatcaatcccagtctgctttgcccggccgatcgacggtaccgcgctttgagaaccacatgggccaaggctgatccccggtctcggcgatcgtttccgttgcgacacaggacaaggcaacgcgaaaaggaaaggcaaaggcatcggggcgagaggatgatgagatttgctagaaggagaatgatcatgcacgcgtgcgctggctccgtgtttcggtctcgcgtttcattgttttgtctcgccgtcgcatgcggatccatgccgaaccttgttgatcaccctttggtaccgccaaaggatatccactttgatcgatcagcctttcttttccctttgatcacgtccttttatatataaagccaagtcttcgcacgttccctttcagcttgtctctagctgaccatggccctgggaattgcaagagtcatataatttcactaatactcctctaagagcgacgggccgatcgaatagctctagcttgagaactatatcagtcgtgggattgtcttgatatcctaggtcctcatcacggtcacgctaaactgtaaataaacaagaacgaccgcgacatggcccccttgccaattgaagcgatccgagaagccttctgggaacgagcatattacgaccatgtcgacgcgaatggcatcagccatacacgagatgggacttcaacctggggtaacttaaaacctcacctttgagctcctgctacccttcatgctgacggatggtcgaccccggtgcttccgcagtttacgctctggtgatcggaggaagcattaccctcgtcttgctcgtcatctccgcggtctacaaacaagattatcgacgcagcgagaatcgacacgctgggcggacaatcgatcggccgaggatagagccggagaaagttgacgagcagccgaggcaactggagccgcggttcggccaggttcagggaatcacacgatgatccttgaccgaatttgagagtgtcgtggatgctgcatgttgtgatgtacctatagatgtacgaccttgtatcgattaacttgtaacccttttccatctgtcataatcgaccgactccaccgttgtactccctgtcccacttctaacaagcttccctgatcgtgatcatcaatgagagacagtttcgaattccaacggttcggttgcaattgcgttgctcgtttttctgaggacttcaccggaaaatgaacgctggtactgcaactacaagactatgagtatacagattttgttcccctcactcagcgcctgtcagtcactaggtatgcctgccttcaccatacggaatcgaatgcaaatgacttctttcttatctatattctatacaacaagatgcgactggacgagcacgatgtgccccggataaagttaaggtcgtgctcgctgtgcgtgatgatttgatgcgatacaggtatagggcgtgcgacacgacgggtgattatcgctggagatatccggaacagaatcgaaaaggcgatctgggcgccttgggctcgaaggggcatggtggtgcctccggatgggtgattggcaggcgttttgaattcaactggattacattggtccagcgggtgcgacatcatctaccagggaacgtatcctcgaggtcaccgcaatggggtacatcctatgagacggttccacacgataagttcagatagaatgagatggcagaagcagacatgtctcacctagcttccatacggtcgcatatagcttgggcagcgtccttgttaccggcctggagttctgcgcggatcatggtttcgctgtgaggcgtcacggcagatcagtcttatgccttaaagagctaaatagcagtaccaggactgactatgtcgaaggttctcggaaaacgacagtggtatccgcagtagtggcaggcttgacctgacccgacgaggtcaggagagttgggtggttattaggtgcggctttgcctgagagcgaaccaatcacagatgtcagccaatgtatgcagacaaaggttggataacgccgcccttgactgaccgatgccactatcgcccatgctctcgaaaacggctctcgagttctcgatctggccgacgttgccgtagcctttgatcaacatgttgtagacgtaggcggtcgccctgatcccctgttccgtcatcctggcccggtaagactccatctctgtcaccatcttgtgttgggccaatacgctcatcagcgcttcccagcacaccggctcaattggcccacccctcttgttcgagggatgagtcgggatggattcaaacatgtcaacagcgtcttgggcgttgccagccacatttccggtggcatgaatcatggatgcccagtgagtaccagctaccgagacacggctatcgttgcacaagttgttgaagaccgtctgcatggcgctcaaatcgaccggctcgagcgtgccatatgcgtcgagcaagagcttgtaggtatgggcagacggagccacgttggcctggaccatctggtcgtaatagtgaaggacgagctctctggatgggtggctttgcagatgaagctgcatcattgtgctacaaaggtaaaatactgtaaatcagcgaggtgcgtcttgcgcgatattcttgattgtagctcacttgtatgggggcactcgaggcttgtgattgggaatcgattgcatttcctcgaaaagtgtcgcggcagattccgcatcgccaacacgacaacacgcgttgatgacggcaccgtaggtcaccgagctgggtcgaatcccctgagccttcatcttcttgaagaactcgagcgctacttcggccttacgggcacgagacagcttcgagatgatcgtgttatacaggaacaaggtaggcacgacgccgaggttctggctctcttcccagagttccctggcgaccgaagcgtcatcggtggtgtctttggcggaagagatcatcaatgcgtaggcttcggctgttgggacccgattctgctcgagaattgcagcgcgatgcagtccggcttgctccaagcgcccgagaaggcagcatgccatcaacatgtgatcttcgattgtataccaggcgtccagacgcctctcgtctgacaggttcgcgagcgaggcgtgagcgtattggtagagctcggcgaccttgtcggccaagccaagacgggccatcgacgtggtgaggcgggcaatgacggcgggatggggcaattcaccctctgcctcacatttcttgaggattgcgtaagcctctatcggcgttctagcaggtcgcataccaagatgttggtcgatttggcgagcgataccgttgtgtgcaggtctatattgacggacgtcggtctctgccgagtgctcagtgggcaaagtggaagcctgtgacgcgctatccgacgatgaaggcgagggtatatcggagagggcggccgaaatgtcgctggatgagtcggtacggtcgagcaggtcggcggcaacctcggtgccaaagcaggattccaagaaggtcttggcgtactgtttccctcttcgctgctgcacgagcgatgccgccataagcagagaagacctatccatggcgtggtctccttgaacgaccgagagtcgtcggataatctcttcactttgttgatcgaagtcgacactctggtcacccttaagcggactgacaacggcgccaccgactcgagccaaagcgcgaacgattgtgctcagggtctccctttcgctctcgtctgcccaagcttgcatggcagcagggtcggtaggcaattcagcgaccagctcggggaccatttcccgagcgaattcacggggctgagcctgctttgataagtcggttacgtgcatgacctcgagtcgcttgcgaagagtgtccgcctggcggtatatgccgttgagcaatgaacccgtgttggaagcgataataatgccggtgaactccgagtgtttgctgataagacggagaagattatatgcctgttcggggtggtggaactggccagccttttcaacaaaggatccgacagtgagagaatcaatgttccatttttccgtagaaggccacgagctggtcaatcggtcgacggcgaagatgatccgctcggccagttccggcgcgatctcgggttgttgcaatttggcgacgagctggatgacagcacgcctgataaagacgaggtcgaacgtcaagtcaccggggcgaccgagcgagctgattgctaggatggcctcgatgttatcgtcgttcaacgccttgtacccgaggagtcgagcggtcctctgcattgagctcaggttcatctcggattgctgctcgctgataaactcgatcgccctttgccattggccccggtcaaagagcgcctcggcgatgttgaagatggcgctcgcgttgacccgaatcagatgacctgcccgcctctcctcttcgtcggtggtgcttctcatcaactgcaagagcgactgaaccttgtcgtcctctccgagcttggtatatcccttcaacagactgtcaaaaaaggcggctacgcctcgcatgatatcggtcgcctcgccaaaagcggccgcttccgccttcgttttgtccggcccaggctcgccgaacccgttgcgttttcgtccatccctgatcttgccgttcttttcgtccaaaaggaagcgtttcagtacgtcctgcatcccctcgactccgccctccgggctcttggagtagcattcgacgaggtgagcgtagaggatgactagactctgtccatcgaccgattgagtctttttgtcagtgttcctgaccccctcgaggtggctccataccgtggtgatggtctcgagatcacccctggacgctgcggcgcccatcaagagcgcgtataccgccaactggaaaggccggtgacggttgtacgtcacaccagactggaagagcttgatggcgttttcgtagttgcgttcctttttcaaggcggcgatttgctcttcaacgggctgcaacgatcgatctcgctcctggaattgataatccgctccgcccgtcccgtcctttcgaatcgacctggcgtgcctcttatcccactcgatccacttgcgcttggctgccgactcggcgacggcggcttgaacctcgttgtgcctctccatgagcgaacggatgacgaatgagtacgtcctaatattgggcaagacgtctcgctcgagcatctcgttgtacgcctttaagatctgagtgatgggttccccgacccgccggtaacgatggagaatctcgatgacggcgttgtacccgctctgagtgaaaaaggggggctcgacgtcggctcccgaggagatcttggggtccgaatgaagggccgcagggttcctgtactcttcggccagtcggagcgccttttccctctgaccattccggacggcctgaatcatctgctcccatttaccctcgtcccgcctctgcagctcttccctcaattcgctctcggccaacccgagctcgccgcgattgacgggtttgcctgtcgatcggtcgtcggatcggacggcggacgtcgagctcgtcgaggcggagtacgaatttcgacgaggtcgatccaccccgttgaccccgcggccctggctgatgatcctcatcctctgtaacccaacccgccttgaagcgttcatctccaagtcatctaccgtcctgcccctcccctcggattgagaagaaaacgtcctggtccggctggatgacaacccagataatcgggtgggtaacctaacgaacttccctccgcgaaggccgaccgtccaggtgccgacgatgggcaaggcgtcttcccgcccactcgctcgacgacggtgaagacgatgttcccgcctagtcacccactcgacgtccgaatccgggtcttctactgcggattcgtcctccctgagcgacctatcccgaacatcgctcgtggtcgtgtcatcgaccgatgtctcgatgatctcgacctgttgactcgccgatgtaggcgaggggggcaggtcgagcccgttggtcgacttaacccggctggacgatcgtcttctcgtcgatttggaacgagcgagcgtggatgggcgtctcgatcggatatcagatagggtgagcgcgtctcgctcgacaaggtcgtcttccccgtcctgagcctgttgcgtggtcgattgagattgaggcgcttgggtaagggttcgaccgaagccctgtgaagataaaggtaaagtcgcatgggacgaacatcgtcagccttcaacccgcgtccccgggcactcgatcggtgacaaagacgatcaaacccgcgggacactcacggtatacccggaaaacttgctccccgctccgttaccggctccgggtccactcccagcacctgtacctcccgcatttcctaacccccaagcggccccgacgaaattccctccattctgctggatcgtagcgatctgcgcttgacccgcctggacttgagcttgagtgaggagagtggcattgctcgtgaacgcttgggtggtagaaggtccaaaggcggaagaggtggccgaggtggcgctggtcgctgttgttgttgtcgtagttgtggtagcggccgcagagtgtgaatttgtcaagagaccctgtagacgcaggatcggtcggaggtgggatctatgcgcgtgtcgtcgatcgaggtcaaggtcagcagggcagatctcaacgtccaggtcgtgtgggtctggccatgtgcaggacttacgccgccttgaccaacatcttgcaagagatccagctgtggctcgtgaaaagcacagatctatgcgtgttcccgtattatacctaatgcttgtttgactatggacgaggtgtatatcgatggaccagatagagtgaggctgtaagtagctagttgctagttgctagttgtgtgtgtgtggtattccgagtttgtcgtgatcgatagttttcagaatttgcatccgcgaaatccctcggtttgcgagccgaaacgacgagcaagccctgactggggggaacagctggttatatgatgaatggtggatgacaggcgacgaagctcgatcgactcggcatgtaagatcagagatggtgcgtcgtcgtcatgtgttcggatcactctgcttttctgattgggatccgctggttttactccgtcgccacccaaaaccgtttgccgtgacttcgaaaagatctaggtgaggccaagttgatccgaagttccgagttccgcgatttcataacgcataaacttccgaatcatcgcttcggaagctattttcgggtgtttatgcgttttccaaactaaatctgtcgatccagtcgaatcagaggtttgttgatcttgtcagccttgttcatgtggaggagaaacgtcattcaagaccaggtcgatcagcataatcatcaattgtcagctaccacctctttcatccatccaaccgcaatcaatcccattcgagtcttacttgccgattcatggccatgaccacacggtgagctctatctctggacgtccaacgacgcacaggctcaaacccacaccccaccaccaccgtcgggcaggcacgacttttaccaaaacgacgttcgcgtgtttatcagcatctaccgtaaaaaagtggtcgaggacgagctcgaaatccatgccgaggccaattctgcaagtcgtcgttttttcccccccccccctcccccttttccgcgtggtatagagagggtggccgtgctgatcgatgagctcgacatgtagctaaaggtcgcggtcgcaggtgaggtcttgctcgacctggaccccttgtgggcggagattgagcacgagcaaacgagcagcaaggtattcgggaccaaggtcagtctcgtcccgtctccgaggataccgtccaaccaatagaaagaggaagaaacaaagaattacccaggcgcccgtcgagctgacacgagcacgttgaatgccggtaaataacaggtcgaggtccagcttttgaaatcaaaccctggacattcatggcccagtctcgcccgatcgtctggggacgctcatcaaccgatcgcttccacctctaccaccacgaccgcccctcccaccgatcgaccccgccggcgtaacaagtttgacacgctcgacctggattccgaactcggggacactgatgccgatcctcattccgacccggacgctaccaacagcaagggtcagaacaacggcgggacgggcacctcggagaaagatctcgagaggttctttcaacaggtctatggagatctgggggaagaggggaagagggcgatgatgaagagttttaccgagagtggggggaccgtcttgagtaccgattggggggatgtcggaggcaggaaagtcgtgccccagccgcccaagtgaggtgcaaggtagggcagggtacgggtcacatgcgatctgggcgctcgagatgaggaacggggatgcatttggtgtacagcaattcgactacaggatggatgtgtatcgagattacacacactctctttggcgcacggacgacccggccgattactggccactcttcttggtatacttgtcccatataccgtcaggatccccaccggcacccttgatatggacgaccttcatctgaccgggcacgtcgagctcgcgcgattgttgcgcctcgtggtcccagatcgtaatcttctgttgatcggtattcacattttggagattgacgtcgaggacggtttatgttatgggtacccccgatgacgggccagaaaccgctcgggttctttttggcggtattaggatcagactttgtttctgggacgatgacgatcaggggctggaacaacgttccgctcggtagtcagcggccacggccaggagtcgaggttcgaatcattcgcgtgatgcttacggtcttgtctccttctttgagaagcttttcgacatcctcgttacgctcctcgtaacccccggtgatctcgcattcctcgcccgtcaccgactggaggagatggacgcccgattgttctcccttattccacggatcttcgggttcgccagctagtcgaagacaagcttcccggtcggccgcccgagcgcagtcgtccatagatatttcctgcgcttgctccacgtcgacatagaaatacgcgcggttgacgaaatatggccaggtggatgaaccgttggtgcccccgagttcccgcgcttctttgatcagggtctggagctcggttccttgtctaatatagtcggtgaaaccgtcatttttacgtccttgaacttgagtagcgatcgtcatcttgtccttgccggatagacaccagttagacgagttgtggtcaccgctcgcaaaggctttctggacgtctcctggagcgaactgcaagcatgtctaggttgatgaagtgtgtgtttgaagacgaggaataccagcgtaccttggcccatgcgcccataacagccaaacgagtcttgatgactgggttgatcttttcatcgtccgcgaggagccgaggcgcggttgcctcattgacgttgacacttccgttctggttggggttttaaagtccccatcggtgggcggctgccaaagtggaaccccttgcatctcatccagacaccaatctagggcttctttaggagtccttcgagtcagggcggggccgtcaagactgtcagccggactcagcgccaatccgtccatggctgaatccagggcaaaagaagtggtcaacattcagcatcgcagatagcaaagaaacgggtatgaatacacctacgcaaagccatgagggatagcatcatggaaacaatgatccttctttgcattattaagatcgggtcagtcggatgagttacgttttgctttttacttttaagaagcttgacggctctgatttccagtacacgaatgatcaggcttcttcaatcacaaatctagcagagatagaagaatcggggcgaacttacgctttcacgctatggtgcaatcaagtatcacgaccgttgcgacatgcgttcgctctaccccgtcgcaatcggccgacgaaacggaagattgaggggtacaaaagaaacgtcgaaacatcccgattgagcaaaggaggtccaggggcaacaggcgtcgggcaactttaacattcgtgagctttcccactgatcaataccttaagccgatgggatgatgccgtacattagaagaaccatagcagcctcttgccgtaccgtacagagtgcattttcaagtcttcacggtcgttccgtgtatatatcacctgggactttaacgaagtctggaaggccggcagacacgctcattatcgattgacagaactttcgagacgtttttactgggaaattatagtggagccgtaccgagcacaagatcgttttccattacagcataagtacaacagattgaatatgttacagtacagcatagatacgtataacaaacgggcatcaacagtggtatgtgcgtcagttcctctagttattcaaggccgacgagggcagcacaagctcaaggaaatttgcccttgccgtccttgtacttgtcccagtgcccgttgggttcgccaccagcgcctttgatgtggaccaccttcatcttgacaggaaggttagcgacagaagtgcgacctgcggtataattccagagcataatcgcatctgtagctcctgcctgaccttctatgatacccgaaggctgaacgtcggcactttgcttgtactccatgacaggccaaattccccgcctatattcgttgatcgaggggtcatccggtagtaggacgaccacgggctgtcaacgaggcaaaatgggaaacctcgatatcagttcatgtcgacggaggtaccgattacacgcttcatggcgactcacagtgtctttggacttggcaagaatcctgttgacgtcttcgttattctcctcgtaccctccagtgatttcgcagtcttcacccgtcaaagtggacaggaagctgacagcttgactctccccttgagcgagagtattatcagatgctaccgagttgagatctccaggacgacaagcctggttgataaaccatggccaggcagccaaacctggatctccagccaggactttggctgtttcgatgctctttttcaggtcgtcgccctccttgatgtaggcatcccatccgtccttcttttgatgcccagctggggcagcgagggtgaatttttctttgccagagagacaccaagcggccgctttatctgtacctccagcgaacgcttgttgaacttccacttcagcgagctgtgcccatcgggttaaaaagtcagcggttgcggtcattctcgggtatgaagccatctcaccctagcccaagctgccatcgcagccaaacgcgcctgtatgatcagcccgatttcctttcctccggcatcctttcctgcgatgagatagtctcgaacatcgttgatgcggactgtaccgtgtctgctggtgtctttagagtcgacattgccatcagccaaccagaggggaatgccggcctgatcgttcctgcaccacgcaagggatgcgtttacttttgcgaagtctctagagaccaatgcggatccagaggtttccagcggagagctgaccgtcgatgaaatgctaggaaagtgcggctgtgggaccagcacggtgtatgccgctgtaaggccaaaagattagtttaaccgtggtcaaaggtattttacggcgagtgataaagacacacgacaagccgcgagagaaagcagcagcgcaatcatcgctttcgagtgcatcgtgaatctcgtctcgtacagagcccgaaacagatgtattttggcagcaaattctcggtcacttgaggttttctggtaatctgccttcgaaagtactttgctccctctgatatacatcgagatgactgcctggcttctgctcaaatgcctcacacgtccgtggctcggggacgtcaaaggagcattggaaacgtatattgcggcaaaggaagtcattcagggtcgagtgtttggctcgatctgaaacttcaaccccatgtttactcattcgtttacacagaacacggtgaggtgcattcttggtagtcattgtgcgacctgaaacacgctgcatatatctcgaaacagcacgaggtcccgcccattttcgcgaaccagttagaagcgcgcgtctctcgatcacaagcgcaaccaacgacgtcgttacgagttaccgttcaacgaggatatcgaggtcgatgtcaacgatcatagagtcgcttagcacatcctctagactgttcactagacacagaatagaccagtacgaggaatagatccacaatgccttcaaagcagcccctctccccttaccccgtcatcgacgcggaccctactttcggacgggtggtcaggtacatgcgacctagcgactatgctgcatgggctggagccgctgctgccggacctgccgccttttgggccctcggtgagtggtcagaggggtcgttatatcgatagaggaagagccagtatgatcccgatatcgaggatggtggacgcgcaggttgggcctcgcggacagactgcgcagaactccgggcatatcgttgcaacacctcgaacactcgagttccatcatcatcgttgtctggcctgtccttcctcttccgacggtcgtgttatcgtatcttatgagaccatcgctgacatgccttgctcccactccattcgtccacctatacacgcaccgcagaacgagccgacccttcccgtgcacccacccgatcggccatgaagctcgtcggtttccttggagtctcggctgggttcttgttcgcttaccagaggagcagttgtgagtctgctcggccgtgtttttcttgttcccacctgttgggtgcatgcgttgagcgggggaaagcacgatatggtggttatgatcggcgaagggatggcttaacgtcgaggaagattgctcgggagacgccgacgggaacgacttgcagctcgacctgagagaccacggtctcgggatcactcgtctgcagtcgaaatcggaatatctgcttcacatatgaccgtttccctgcaactagactgattcgatcaactttactttcaccccacagtccgattcatgggtctttctgagaacgccgacgaggccaagaaggatcacgccgagctttccgcccgtgtcaaggccggtcaacccatttacggcgagacggacctgagcgactacgtccagagtgtggccgcgaggaactctacgtggagtcaattgaagttgagcgcgatgccatggtgagtatcgacaaggacttccgtcgaaccgatgcgatgtgtcgggatctgtgtcgggatcgttgtcgtgatcgtgtcgtgatcgaaacgctgagatgctgctacttgggtgtcaggttcaacttggtcaaccacaactaccacggagtcgacacgtcaaagtacggtgaacaaaagtagagcgagggagatccctgggaggatgggtcgagcggaggatggacgatgtctcggtttgtccggacgatctacatgtgacgagaatggtgtctgcgcttttgtctcttctgctgctatccattattgtaataatgccaaacctattcgaagcacgcacaacactcgcacgagaattgacgagaccttgtcgtgtcgtcggcgaaacccgcgcacaagagagggcgagacggtcaatcaaccaaaagactcccaagaggaatcaacttgcaactcgccatcatcatcaattcatcaacttaccatatcaccaggaattgcttgtacataccagtcaatcgatccatagcagagttcagtcctcctctctcaaaccaggtcggctcgctcggtaaatttccttacctgcgacatcggccgaaagacgtacaatctcaaagggcgtcaaccgggaccatccttcttgttcccatcaaaggagtcttgtcgacagacacatcccttggagtttcgaaagaacccacgacaagacaaccacacgtagctactattacggaagctaagtctccatagcagaataggtatcgagctcgagcgacgataccgacattccgtcgggctggaccagtggacgatcaggaaacaaaagatcgttgattgcggccaggttccgattggaagacgagggcacttccgttcagggtttctgaccgagttgcgagccccaacttgaggagatataaaagtatgcatatcacgctcgaagctatcacgagctgggctcggaaggcgaccggggacgtcccggaacctatggttgtgagtgttcctatgtcgagcgataccaacacgcagcaccacttacctcttcatttggaacgaccaggggccgtcgactaccttggtgaccattccacatccggagaaacagggagaaaccaaaactcagatttgggtctacggaggaaggtctgtacggacacggagagtcagtagtggactctggtgtctagacgtggagacgctcgtatgggaaaaagtcggcccgggggagaacacggcggatgcatggccgagagggaggtactttcatacggccgatcgatgtgagtcggatcgacggtttgaatggacaagtacagcctgacggtgtatcgacttagggagaaacaacctggtcgttttcggtggaatgggcttgaccacgccaagaaatccttcctcgcccgcggttgataccccaacgtcgacagaagggtccatgacttcagtggtaagcgaagaaccctgcgtcttaaacggtgtctggatgtttgactgtgtggcgcggcgatggaatcgcccggacaatgcgaacgtcgggatgaaccttgaggagggcatcttggagccagtggaaaacttgcctgctccgaggtatgctcataccagcgtcatcagcgggggaaagctagtcgtcaccggtggacaagatttgaaaaacgagtgagtttggcggacaggaccatcgtgccgcaacgcatactgatccccgagatcgggttacttccagctacatcatgcaggcgtcggtcctcgatctgacccggatggtatgggacccaccttatgacatcacggaccaccgaggttcatatcgtagcgtctccgtagcttcacgatattctcttgagccacaaaccaccgcctcgaaagatgactacgggaacccacttgaagctctgccttactcggttgaagccgcagatggatgtgatgagatctacacgttttccaactcgaacttcaccgacgtacggaggcagatacagttgtcgcgcttcgaatccgatggacggggtctagtgacaagggatattaccacgcagatgacttcgcgctcgcagacgcttccgccaggcttgcggttcccgtttgcgagcatcatcggtcaccatctcatcatcgccggaacctacctatcagctagcgagcaagagtacatcgtatgggcgctggatttgaaagaggccaagtggagaaagatcgacgccttagttttggcttcgagcggcaagatggtttcaggaccagacgccgagtccttcggaggagggagttggaacaaggctgttgcttgggaggaagcaggcaagctgatggtattcggcaacaagaacagaagcttggccgaggattgtgagtcgaggtggttcagttctcaatcttagcataaggggtgtgtctgacgactctcgtcatgcccgttgctcgctgaatagacgaacaaagagccatcaattttggacatgttgcaatcatcgacctcgaagttcttgggatctatcagccgcctgtccgggaatgcgcatactccaatcggatgatcccgttcgctctcaaaagtcttcgggaaagctggagctcagactaccatatcgtttgcgaggatggcagagctttggcttgctcgaaagaaattctcaaagagcgttggccctggttcaaaaagggctgggaagaaacgtgtctcaaggcaagggaagtcgtcgaaggaatgtcgacagacccgactcccgagatgacaaacggggacgcaccttcgcaacctgttggagataaaactgccgcctcgcggatagaccgctggaaaaccgccctcaaagtcgagccgcagactttgcagcttgccgaaccttatcctatctgcaaagcgctgctcgagtacctgtacactcatgacttggtgacgccgctgcagcatcgacctcctatcttgagtgcactcttaatcttggcgaagcagtacgagctggaagacctcaagcgcaaggtcgtatacgccatgcatgagcgccttagcaaagcgaattgcctggggatttacgagattgctagcttgtgcgcatgtacgagtttgcaggttcgggcactccgtatggtcttggtgagtgcgactatcgggtccgacaggcgattctttcagtctgattttccagaccatttcattacaggcaaagcaaaaagcggaaactcgaagttccgctcaccggcgaggtgattcgagcgcgggcctcacgcctgcttccggtcgcggagctgatggcgggcagtacaatgccagtgcttcgaatgggcatgggcgtcagggatcggtcgggtcccgtatgctcccctcggccagctcgggaaataccgggtcgcaaggctacgcaatgaacctgccaccatcctcttatcgtataagcaagtcgcctcggacccggtcaccctcgctgtcgggagcaagcctcaagacatctcccttaccgataccctccgaaaacatcttcactttccctccgaaactcgcacaggaggcaaatctgggtgagccgctagcatcaacttcagaaccacgatctttgaggactgcatcgtctcagcctgttctgaacgcctggcgggatgagcgaccgtctcattggacaacggcgcataatggcgaatctagaccgcatacgcagcaaaccgaggcctcgccgcaaagcggtagcctcccggatgcggaggatggatccgattacgagccaccctcgtacaagggcagaccccgtacggcgagtctcaagtctgtgcaccattacgaggatggcctggccaacgcacgctggtcacacggcgtcgatgaccacggcaacaggcttcggcccgccgatgacaaaagcagtcgaccatgctcaaatacgatggcatctccgcgtactaggaagagtataagcaaatcgcattccatctcatctttcttcaacatgccctcggctacctcttccattacctggatcggtcagcatctgcagtcgaggtctccttcggtgcagggtccgcgggtgacgtctccgaacgagaacgtactggatgtgacagtcggggcagagaccgcaagcgactgcacgcttgggaccccggaatcgtcgagttcttccgcggactctgaactctcgtcactggcctggacggatcccagtgatgggttggttttctggcagggcagagatcaaaaggagtcgagcaatcgtcatcagcgattatgctcattaggtggggatgaggacaagaacaagacccccatgccaaagcggacgctacaggtcgacacgcgtctggcgcaaaagcagcgcaggcaagcgcaagtgaaacaggacgcttcggacgctcggatctcgcctcggggagagatgccgttgttcttcgtgccccccgctcagtctcgcggcgtacattgaagaggagtttggggactgattgcgaatcttgactctcccacgtatcgtttcggtcgcctgacgattgtagcctatcaggagagcaggatcgtctgagtacacatgcaaatttcataatggtcattaggccacagagacactatgatacctgtgccgaacccctctattcgcacacgagtctctcagaggatgtcgccgcgttccagactggcgtgccggggacagctgccttcgtcgattatgtttcggcctacagtccgcagcagcataaagatgctccggctgttctcgcagtaagaagctgcatgtcccgccgtagggacggaccaagcaagataggacattaactgtcccccctctcccaaaatcgccaaaatcgaaactgcaatccttcaatattagatactatggtaaaggtatccgacctccccacgcagcttgaatctgggttgaccgaagagaggaaagagacggtatcaaaattctttcatcgcaaagatggctcgcgacggaaaatgagaatagcgataacgctatgtgagtatacattgaaggacgacgaccacctcatctagtcgcgctgcttcgactgacgtttcgatcgcttggtcggtcaggtttggtgctcatcatcgcgacggtcatcgtcatcgcggtgctcaggtcgaaaaagaggaaagctactggcaggggcagttctggcagaggatatacaggaggtcgtctaggtcatgctccggaatcttctgccacagtcaacctcactgtactgagcacgaccagcatggcgccgatgtttgcgacgacgctcggctttagctagtctgccagatggccttggatggatcgccgtttctttcttctgctcgcttccgacgttcttgcttgcagcacgatagtctacacgataccgagtcttactcccagatctctttacatattatcaaggaatagcattccagcatcgttattgatcttgtatattgccagatcttgccatgaccttgatctgcttcgcgccacttcgaggtccggcctaagcgcggatcaagccgaagctcgggagatgatcattacctcgatcaagctgactaccatagaccatagatccataaagtcatatctcagacccatgctacacccttctattcacaatcaagctggtggcatacgtattatcaagcgcatagagagcttcatcagatgcatgatattcgatagccataagcaccgacggccagacgaccatcatgatctctggggaccacggaggtcgacccgcacctgtcgatcactttgacgtctttccaaacgaggccttgggacccttcaagctgggagaaacgttctggacggtagcagagatcttgaagactcatcgggatactttcagggtggtcgatgtatcatgggaccgggaggtgagcgaatatgagcgagctccgacatccatcaggttcgactggctgatacggagagcctgcaccgtcatccctgcgaagaaacccgcagcgggcgctctactgctcaaagtggacggatggatcaccctatgcttcccctctacaccgtctccgtgcccacagatccttcagcggatagatatcactgctaccgtctcgtcagacccatcttcgtcggccccgacgacgaacaagaaccgacctcgtctggcgtacggcagccagacactacattccatcaccgagccgctgaataggaacagggtgtccacgctcttcggaccgactttccaaacgaacagtacaccccttcggacgtgctacccagggatcgggtttgagtggtccacctcttcctctcagacgaacgtcaagtccccgagcaggaaaggtggaggtgatccagcggaaggtgaacagattggcagaatctcgatatttcaagatcaaggcggcgatcatactgcgaatctagaaatgatgactcgggcggtcgaggtcgtgtgggaagggtttgtgccgaatgccgccatggaaggcagtctcaagctatgccaaatcgaggtgcgttcgtcatatcgcccgcggctgcacctagatgaccgcgctgatgatattttcctactatcagcctggcaaatctgtggccttgcattggcatggccgcgctcgcgagtccccctcgaaaccatacaacatcgtcctacatcatactctcgctcaagacatcttgctggacctcgggacgccttcccggaggtatacaaagcaggataatcggttcgaaggtatgtacggccaaggccaagagcgagaagatcggactcgggcacgtaagggggagaagacctggtggaactatttccaactcggcctggactttcttgtcgacgataatgacggaggggtcatcgtcaaggtcatggcgcattccaatatcgtgagtcacactgggcgaggctgaacgctagcatacggtgttcgcatgacactaaagatttacatgccccgatgtagccagggacggcgttgttccaacgttatgcgcgatgtccatgggaaattctcgtccccggtcataagggcgagacgttgatctgccgtgacaccttgaaagcagcgacggccgcattttccaagtcgataggcaatggaactttcaagtccgcgaaatcctccaatgcatcgaactctggtgccgacattgcggcaatgacgctcgatcggacaaacgagcccggcttcgaagatatcatcaatattgatcccagcaggatcgtcgcgctggacgggatcatcatcgaagaaggcccaggcggtgcggggttggcctctgttctgatatgctgacaagccgtgttgataatcttgtagttgtactcctgtaacagacaatttcaataaccatcgatacccgacacgatcgtcttgaaagcaccgcacgtagcgacgtggcgacatctcatcatgacatttcagcatgggggatcgtactattgatcccaaagttgtacatcgatccatttcggataccactagtgattaaatacagtacgacaatggccagtaggcgacgcgattaaaagagaagggcagatggccggcgcctggcgagaaacataagtgtaaagcgatcggtggatgggtgcgagcgtcatggacagctcgcaatggcggatggaatgtgtcgatcgagcgtcgtcgtcggaggatgcgacggggcgggccgagcaatgataaggggatcgttctaatgtcgattgcaatttgacggcaaggaacgtgaattgtgctgttgttgctggtgatgatgaaaatgtcctcagggacggatcgtcccgatgagaagatcgacgtcgcgcctagaagtcgccgccctcggtttcgagcaacttggcgttgcgttcgcgttcaatcatgatttcgtaaagctcgtgcccgcactttttcactccggcggcctgtcggggccatatacgaacggcccagtcgcgcacaaagacggcggccttcatgtacttgcgggacgagtatttgcggtaaaacgagtcgttgctagggaaattccggtcgagggtgtagttgagcatgagctgagcgacggggaggatctcttcctcggtgtaactcgaatagtgtgtgagggtagcgtcctgaacggggcaaggtgtcaaggacgacatggtcagccacgtgaaacggtttgacgctcgacccagacgcccggcgcggcatgactcacccattctgaacgctccaagacgagcctggccatccaaactccggcggcggcgagcagactcggggggtagcccaagaaccgatgatcgacgcacgacatctccatcaagtacttggcgagcgtcctcgtctgaatgtcgtacccctcggccttggagacccttctcaaaaagtgcatggggttggggtaactcaggtcgaattcgagcgtggtcaagacgtatttctcggccgagaggatctcgtcgtccgtgtacccgccgtcggccatgaacaaaaagttggacacggtcgggcagatgacctcttcgtatttcgccgcgataaagaggcaggtgagaccgacgagttggagcttggcgagcgagacgactcgggcagagaggaatcggtcgacgaggttgacggcgaggaagagggtttcggggaggagacgaaacttgtgatgcacctcgatgagccagtcggtgaggagactcctcatctcccatttaagatgaggctgctgttccatgtattcagtattgggcatgcaactctcctacgagggcagcagattggggacggacggggtcagttgacgttacacctaaatttgcgtctctgacgacgacgacggacgatggactcacctcgagctccttcatgtaattgaaaatatcctgaacgtactcgacgaccatggtcggatcatcaccgtcgtcggcatcaatgtcctgtaccatatcgcccaaccttccgcccgacatgccgatcgcgtcctcttccaattcgtaaggctgttcatcctccagagcgtccactccggcctcacggacgccggcgggtcgagcgaccgcttcttcctcttcctcgacatcgaccaaccgtccatgctcgtgctcaaactcgggctcgcgttccaattcagcgtcgtcccgcttgaccgggctcgacgttcggatccgcttggaagacggctggatcgggttctcctcctccccgtggtgcgtctcgtcgatctctcgtttcacgctcgtctgtcgttcgagcgcgacgggttgagcgggagggacggtctggacgacggaactggccgtcaaggtacgtttgatccccgcccgggcatggttgacggtggacgaggtcgccttgcccgtcaacggttcgcgcttggtggtgccggcaacagcgacagtatcatcttccttgacgttgacgttcttggcagacggacgggtccgtgcggcaggtcgagcccgagcggtcgaggtgatggtcgatcggctaggtccagcagcagtgggttccacgggtccgtccacgacaggcttgtcggcggcagccagactgttccgtgtgacccttcgcgcgatgataggtcgacccgtgacggtcgaagtcgatttgctccccgtcgatttcgccttttgatcacccgacgtgacgttggtagcgtccttgttcgtcaactctcccaaggccgctcggttcctcgtccccgtttcttgctgcttcgaggacccgacgaccactcggcttgtccccatggtagactgtttcgcgtccaaacccccggccttgcccgatgtcgtcgtcgtcgcggcttttttcgcgaggacggtcgacgccgaagaatttgtcctgctcatgctcggcttgatggcgacggtggatgtagcagcgacgccgggtttgacactggcggtactgcgggatcgggtggtaggtgcgttctcatcggtgagcgtgttgcgcgcgggcaatcctcgcgttcgacgggtctgcagagacaggagtcgaggtcgatgtcgaaaagcacgcgaggtcgagggtggttgtggtatggtggaagcgatgtgatgtatgagaaagagagacacagaatgatagattggggaaacgattcgagaaatgttcagcgatcgcgacctggacaagccacctctatcgcgagatgacgtacagcagccatgatcgacaagtcgacgagttaaggaagccggatcggatcgttcagagtggtgatgatgatgatgggtgaagggagtcaattcggaccgccagagagacgactatgagagatcaaggactcgatcagtgagtgatcgagtggctggtatcgagacgaatcgaccgggttgtactcacagagtcacgtccaagagacccgtctcttttgttcgagcgatgcgcgagagaagagaggtcttccgtgttgattctatggtaccgtcaacgagattgcatggctggagaggtgagaggctggaggacgaggtcgttatgttcagacgaagatgggtgaataggctggttggcagggtataggagatggtcgatctgatagagagagaatggaggggattgatcgatccttcccaggtcgagttggctggctcaaagctcaaattgcgcgcaaacgcgacgaaagtgagagagagacgcgttcaaagtggaaagagggggggggccgagctgaaaacgcatagaacatgcatatacgacggtgaaaacgcataatcccgaagcggggttatcgttcgagcatccctacaaaccccgtccgacttcaatttatgaaaccgcagcattatgatggttccttgaggataataggacattttccgaggtcaccccattcccaaaggacgcgcattcaacgtcaaacaggttgatcacgatcggatcacgtgacttcgtcaacccatctcttaccctttcgaactcactttgtgcagcattgaagccatgaaacgcaacacaaaccaggtccgacgtgcctctatatagtcctccccagactgtgtggctcgttcggtcgaggacgttccgccgggcggacaatacgagatctagaccgtcgaacccgaagccaaaacggtttgtttacaatgtcgcgcgtccactccaagccagcagttctcgccaccgccatcgtcatcttcgtcgtgaaaccgcctggtagattggtgatgtggtccatcctgccaaggcgtgcatcatggattgacacagagtacttggctgcatccgtttgtctttgtaatgtgacgaaatggatagggaaagcgttcgatcggtcaggtcattgaaggggaagacatggcgattgggaaccctaatcgagacgatgcgactatcattatatacttgtttcatgacccaacgtgggatgataaccgttcgtttgtcgtacatcatacacgatcatggcggactcggtcgatgttgatcgtccgaatgtgactttacttcagtcgccggccacgagataacacacccacaggtcgaacctgacgatatagctacaaccctgccgtatcccgctcatctgtcgtcacgtctacgggtcgccacgcatccgacccgtcctcgagcgcgctgggaaacttagggcaggcaccatatgcatacaagtacaatcacccccggtctccgcccgccgctaaaagacggagaggggtggtagatggatcacaaaggaggcggggaaaactacgtgacggttcaaaaggaagacggagacgggacatctagcacgctaaggaaacgatcgataggacggaaggaggagaatgcgcgcgtctaggcggtctgcacggtcggaaaaaaaatggtgggtgggggagaaaccgacactcgtgatcagccggtcatagcgtacgagacccacgacgactacttacgaatccctcgtactcgtaatcgatcccggcggccttcatcttgctcttcctctccttttcacggttgacgagcttgctccgggtcttgctctgctgagcctccgttcggtcctgtatcacgaatgagcgagaagacgatcagccgggcgcgccaatgccattcatcgagttgcgccgtaccttgccgaactgagacctctccaatcgagccgacgggactcgtcgccatttcctgttggctccgatccagatatccgggtggatcttgtcagcgggcacgacctgcggtcgtcgtcacgcggtagtgtcgagggatcgagagtcagcggacccagccacatttcaaggcgccagagggcaaactcacgtgacattgcaggatatgacccatgagcaggtaattgtgcatcgtctcggccgtgatctcggcgaccgacttgttgggcatctcgatgtaggcgaaatgtttcgaggctccggtctgtaggcgtcggtccgaggttgtaaatccacgagggatcagccacgcataggaccaggggtaaaaaatgggatgtgagacgaacctttttgttcctggccagacgtagtcgggaaatgtccccaaactgggaaaagtaggccttcatctcctcctcgtagaatccatgggggatccttccgaggtacaacactcccttttccttgccctgcgaattcagatcagatcaggacgaggtcgagtcggcgtcgtatggtggtggtcagcagggagtctggcaaaaaagaccgtgatgacgactcacacttcgacgtttagccttgagcagcttttcctggacggccttgtccccctcgacgacctttggcaggtccccagcgaggacctttttctccccggccccaccggcaccggcagcggcatccatatcgacgtcggaatcgtcctcggcctctgactcgtcaccctctccatccgaagaagagaacccgtggataaagtcggcttcttccgtagcggcaggttgtttagccttgggcttggacttcagggcgctcttcaacgtcgaagcgggtttcgaggccgagggggcgacggcagtctcttcgaccgactcgacctgagtctttttagaagagacgggtttcttgcccttcttctcactggcagcggcggcgggaccggtagaagaggacgaggcgacggtaggcaagggtacctcgtccgtcgtcttttctaccgtcaccgcgggtttgctaacgtggaccttggcccgcttgttgggctttccagtgtgatcatcctcggaccgggtggccacgccaggggtgatcttgctggcgtccttgggagcgccggaatgggatttagagttgttctcagtgttcttgatcgtctccgggtcgtgctcagggtccttggcgctcgacgtcgaggcggcggtggtggacttgcgtttcttgccagcgacggcagcgggtttcgacgcctcgacgtcttccttgagcgccatgtcgtccttgccgatagcaggtcgagcgaccggggtcgatttcaaagaggatgcggtggtggtggtggtggtggtcttgcccttcgaggcgggtttggacgcggttttcgacgcggttgctttagccattgtaggaaagcgcttggatgtgagtagtggagaggtgtgtgacgtagctaggtaggtatgtacgatagaatggtgatgatctagaatcgattgcatgtcaaggaatcgaaacgaaacttacctgctcggcctgctctagctgtttgatttcgtctgaaattggttgcgcggaagcaaattttgagaaatcgggcaactttttcaaaaagctccaacagggcaacagggaaaagggggggtgggttgggtatataactagatcgatatacaactcacattgtcgattccacatccacacgcacacacacactctaccctctcgctctctttttcttagtacttcaaggtaagcaacaagtgtctctctgatcacaactttgaaccaacttggcgaggctcattcgggacgcgaatcgtccacgtatctcttttccactcacaacagacctcgtctttcacatccataatgtcgttctttggtctcggaggacaacaggctcagcctcagggtcagatcaaccccgctcaagtcagtcgtcacatctcgtcgcctcccgttcttcttgccacgacgacgacctgaccgtgccacgtcgccccgctttcccgccagtacagatcgagatggccgtcaccgaactcgacatgatcaccgacgtcttcaaccgactcgtcaactcgtgccacgccaaatgtatctcggaaaagtacctcgaaggcgatctcaacaagggagaaggagtctgtatcgatcggtgtacggccaagtttttcgaggtgagtcacggcagagaagacccatctggtcggctggttttttcgcgttctcgattccatccccttcgtttgcctcgacgtcgacattgtcatcgtcgtcgtcgttcgtcgcccagcttgcacgctggcgatgaccataccccgctcatggacggttcgagcaggttcacacttcctcgccagcaccgaaccgaaacccatcccctcccttccgaaccaaacccacccgccctcgtagcccgggatcatctcgttaagagtcgcgccttttgcgccaggagaaggtgtcgggccgcttgggcggggttgggcaggaagtggtgttctttgatgaacgagggggaccaagttgttccacacgagtctgagacgggagattgatttcgatcgggagtccgactgggcatgtcgtcgtttggattaaattgcttctaccgaagaggcgactaatcagtcggacccacataaaacgaaacccaagacgtgccatttgattggcagtcgggtggttttctctttttcttcttatccttccattctactacctccatctttttctctctcttccttgtcgtcgtcgtcatcgatcgtaggcacgttgctgacacgatgtatcttgcccctccctcggccgacgaatgacaggtcaacaaaaaggtcggcgagcgaatgcagaccatgggtggaggtgccggcggacctgggttctaaacccaaactctggtggaacgacgtgaccggggcacggggaacgaatgggaaagcatacacttgcaaaggagaagaaaaagaggagaaacgcagcccaccccccgaccccctcggtgtatcaaactacctcatatcagcttgagattcacgaataaacgacacaaagacgacggagacggaccacggatgacggatgatacacaccatacaacaccgcttacctccttttttttttttcaagcagaagacggcatacgagatgagcgctagtctcgtgggctcggagatgtgcataagagacaggacctattcagagtgctcaagagaacgacatcgctggtgatgaacctcgaatctcccgatatcagcgcagagaacaagccggcgagaccctggacagtcgcaagagagggaccgatgaggatgacacggaaagtctcggcgacaatggccacttgaaacaagacttggacgagacgatgacgattcgaataacactcgcatatggctacgaaaccagatcacgaggaggctgcgatcacctgatgcttctaggctgcgctctgttcggatgcagcgacaggacgttccatctttcatcttattactcaattgtcgaaaggccaccaattccatcaacatgatttagtcgtatgacggagtccgaggtctatacgggcatcgattgaacgatttgaatcatagatgtgcgcctggcatgaaaagggttttcttggggggctaaagaaacgagatggacctgggcccggtgttcggcttgggtcaacctgcaatgtcagatttgtcagttgaagaagggttcgcctttgctctggcgaaagacgatgtcaacggcaagcagttacccagcttatagtaccaacgaccgactgatgacctcaacggtctctgtaaactcagggagacgtgtgggacccaagtacgatgcgcgcaaccatcgacaatcagcgctttgtgctggcgagggcgtagtgttttccttcgaatggcttcgaggatgacacgtccccgctcgcagtccgtcgatggctctctctcagcaagtggtcggcagaactatagctcaatctgggcgagaagtgatcgaagagagggcaaccacgatttgataatcgtcaagggacctcctcgaaagccgggcgacgtgtcgaacgcgagttccttcgttccgaccccagacgggacgaagcagtagtattccaacttcagaatgattcggtccagtcttgttctcgagctcggggttgcctccaagattagacccggcccgtggtcgccagtcgtcgagagtaaccctaacaacgacagagtacctgagcaagatgatccccgaaccgcgtgatcgatgcagccgccaggagtgacccgacccatgcgagtcaatcatatctcgccatcttgaacgagtcattcatcgattaatcgaattcgatcaacagctcgagccacctcgttttcaaagtataaatcagatgtacgtactcgtaacataccaacacatccaacacacgtaccagcctggtcaaacgacaaaattacgccgcgatggacggtaaaaacgcacccactgacatcgctctcgacactcttgcctacccgaacgatgtcgagaccccacgcaccgagaccgacctggggttcgactcggatcaccctacgcaatcgctattcccgacagatggcggtcgtcaggcatggagtttcctcatcgcggcgacgttgatcgagatcatcgtttggggtttaccgttctcggtcggagtcttgcacgagtactgggtgaatgacatgtttgccgggcggggtcaagaaggaacattgacgacggcggccacgttgtaagtgaggatgttgacgtcgtttatggagacccgactcatgctatctcctcgccaggcaatccggactcatgtacatggcagccatcgttcaaggaccgtgagtcgacgtcaaaaaatcggacccaccgtctttggctctgacggacccctcgccggtagcctcctccaagcctttcctcaccgacgcaaccactttttgatcctcggattgctcgctgggacagccgggttctttggaagcgcctttgtcaccgaggcgagtagctcgatcgacctcaatcgattaggatactcatcacgagtcactcgcagccatggcacctgatcgttacgctcggtatcgtctaccccatcagtggatgtgagtcccacgcgatccctcgatatgaatacccttactcaacgtgactggcttccccggcagtcctctacctacccgctgcgaccctgctctttgaatggttcatcgtcaaacgtggattcgctaccgggatcatgttctcgggtcggtctcctcggactcttgcttgaaaaaaacccaccactgacctcgcgtctcgtcgtcgcaggcaccggcgtaggcggattcgtgtttccgttcgtgatgaaggcgttgatcaagcgatttggatataaggtcggcatgtgttgcgtcgtaggtccatccgcttgatttccctcaatggacacaacgattgatccgactcgcaggccgttgcctatgccatcattggcggggtcagcatcccgttcatcgtccctcgtgtgcccgtacgtagacctgggccatcggaccgagcacacccgcagtcgagtctcttgaagaccatcaaaaggaccctgcaaggcaaaggcaccatcaagctcgactttttgcgacggtcgacgttttacgcgtttgtcggcaacaacgttctgagttcaatggctaactttttgccggccgtttacattccatgtgagtcagagacagcagcccctggtgtcgacctcgctgacgtttcctcggaaagcctacgcccatgatctcggaatgaccaagcccgatggtaccgtactgcttgccatgatgaacggcaagtcacggcgtacgacatcacctggcgctctcgcactgaccctcatctctctgccgcagccgcctcgattcccggcttgcttctactcggttacttgtccgacaagatttcactccgcctcgtcatctcgctctcctgctttggaacggccctgtcttgcatctttttatggggattcgcgacgagtaccggagtgctcatcgcgtttgtcatcatgtttgggatgctgggcttaagcttttcggcgatttggaccaaactcatcaccgtgatcgctagtgggttcttgcgtccagatcgtgccgtttccatcgtgctcacgctcggccctacgtagaggacgacccaagtctcccgcccttgttgtttccgatctttgcattctctcgcgggatcggcaacgtgtcttcaggcaagtcacggggcacacgtttccactcgcatactcccggctgacctcagtcgacacttggcaggccccgtctctactgcgctcctgaaatacgactcgatgcagggctcgatcggggcatacggcaagggacactatgtgagtcgcaatggcaaactcgcagtgacaccagcatctgaaactcacaatcgaagggcccacttctcgtctacaccggtatcatgatgacgctggggggtgtctgtgggatcgtctaccggactcggtcctgatgagcgagtggaggcaacgattttgagcggcgattccggttgtcggtcgagtgtagcaacgtccatcgtgtggaatcggcgatttgtacatcggatgatatacgctcactcgcaccgaatacgcctggcttgcacaatgacagctagcgatcttgtcattgccttatagctcaagggttgtcacctgtgaacgcatcaatatataccatgatgcgattcgaggtctcggggatttttcagcttccgacgtgtcgcggcacatcatcatcccgagatcaccgaaccaatcgacgacaactcgttcaaatagctatagggagagggacaaggtatgcaagacctcacatctacatgtttgcatcagccttacagtagcaacgcacgccatgttcttgcgcacatctctacgcaccgggactgctgcgctctttcgccagcaatcaagagctacccgccactataccacaaatacaggcgcccagagaacggcgacgacgacgtcaaacgaacgacgatggcaatacggagccgtcgcctttttgaccctgtctacacttgttctctcacgctctctcgtccattcggatgccgacgctcgacgatccaatgaagccgagcaggacgacccgtacgacaagaagcatcatccggatgaacccaaatcgttcccccatgccaccccgactgagggtctacgtatgatatcctcggccgagttgtccaatcacgataccgaagcagcgggctactgggtggccatcgatgggacggtctacgatgtcaccgaatttattaccagcggtgctcatccgggaggcagcaaggtgttgattcagaatacgggcaaggatgcgaccagcgtgtacaaaccgcttcatccgccgggtcagtcgggtcctgcactgatagcagtcggtatgactcgctgacaacccttcgttgctgtattgcaggcacgatcgaagacaatctggatcccaagttcaaggtcggcgtgatcgatccaagcggtgagccgcatcgttcaacggccacagcatccgggactgactctcgacctctgtacgtgtctagaggccaactcggtcgcccctgaacaatcggaagccgagaaaaagctgcaagaagcgagggacaacatgatgggcgtcgatggcatggtcaacttggacgatttcgaggtgggcccacgctggcttcttcgagccttataagcaacgcctcatctgaccacgcggcccgacttattgtagaaactcgcccggaccatcttgtcgccggccgctttggcctattacgaaagtgggagcgacgacgagtggagtaagtgatctcggacctggacccgaccccgaggctccgggctcatcccccctatagcccttcacgaaaataacaacgcctatcggcggattcgattccgacctcgagtcttgcgcaaagtcaaggatgtcgacacctcgaccgagattctaggtgtcaagagcaccgtcccattctttattgccccggccgctttggccaagttgggtcatccggacggagaggtcaacctgaccaagggagcgtgagtcgtgcgatgtcgagcgcgggaacccaggctgacccagaggttctcccggtggcagtgctgagactggcatcatccaggttatctcctccaacgcctcttgctcgctagaagaattggccgaagccaaggcgcccgggcaaacgctcatgtggcaatactacgtggcagccgatcggtgagtgtctctctaccccgatcatcgagcctggcataaaccgctcacgaccacgcgatctcgcagagctcgagccgaaaagactctccgaaaagctctggatctgggtatgcaatcgatctggctcaccgttgatgcccccgttgtgagtgtccgatctgccaaatgccggaccgcccgtgctaatagactcgctcgacagggaggtaaacgtgaacgagacatgaaggaaaagatcgctcgagatcccgtatgtcgcaccgtcgtcgctcaaagctttcgaccctgcattgacacctccaatttgcagccccccaaagatgccaaacgagaatccggatcggcatcgaccagtgctgcacaattcgcttatgtcgatcccaacctcgaatgggatgacatcgcgtggatccaaaagattgcaccgggtacacccatcgtcatcaagggtatcagctgtgtagaggtgggtccacgtgttcctcagacgtccaaggctctagctgaatctcgacctgcaggacgctgtgttggcatttgaacacggatgcaagggaatcgtactgtcaaaccacggggtgagttgtcgcacacgaatagatcgaaagcccctcgctgacagcgccaacgccgatcatacagggccgacaactcgatgggcaagtgatgatcctcctcgtactcgctggcagaacaacatgctgacgccctcgacctcacagagcccgtgcacccattgaagtcttgcaagaaattcgccgcgaacgaccggacctgtgcgacaagatggaaatttacgtcgacggcggggtcaggcgcggcacggacgtcctcaaggcgctatgtctcggggccaaggccgttgggattggacgaccttttttgtacgcccagtcggcttatggtcctgacggtgtcgtcaaggtggtcgagagtgagtgcagaagcggcttagaagcggcttaccaaaacggcgcacgggctcatgaagcgctttgatagttttgaaagaggaaatggcaacgggaatgcgtctgctcggagtcaacaacgttgcagaactcaagccatcgctcgtcgattgcttgccgtcgagttgaagttgatagaggcacatataagtagtcgcccgagtcccttgtacatcaatcgcgcatcacaaaggcaccgtaggaattcatgaatttatgatagctttgttgaatttattatgacaagcttgatgacgaaatattatgcatgcactctgctctactcgaatcgtcccgctcagaagctgtgcgtggtggtctgatgacgagaacaatgagacccccaagttgatagcacggaagcagcacgtcgtggactcaccaaggggagctgcctcgagctgcttccgacgtggaaagtgaattgtccctgggggacttgccagatctgttcaacgacgttccacatggcgacatccttgcgacggatgctggcgagcgcaaagagaggtttcgccgaatgagcctgatgaccgatacgcccgggctccacgctgtactcacgggaaggacaaggtcttggtctctcccttgccgagcctcttggccttgtcaaatccacgcaactgcttgggaggttgatcgacgccatcggggtattgaacgtactgtcgagcgcggcctagtcagcctccaaatcgtgtgcgaattacatatcgacccccgaaactcaccagctgagcgacttcgcaagcgaccacgtcgccaacattctcgacatcgacagtgacagtcagcagggtatcgtagagcgactctccgttggattgccccttgaacatctcgttggtcgtctgaatagccttgtcgtcggcgtagaaagtggtatccttggcgaggttgtcgtagttgaacttggaataactcagaccatagccgaattctgcagattcgactcagtacgtgagactcgttcgacgagcagcgcgacgctcaccatatctgggttcgatcccgttgacatcaaaccaacggtaatcaaatttcactccctcggtaaagtcgttttgagggttgatgtcggtcgtgttggtcaacgtgtcgggggggtaatcgctgatctttttggcaatggtgaacggcaacttgccgctgggcgagacgtctccgtacaggaccgagaccaaggcgggaccggcctgttctcccggttgcaagggagagacgacggccgtaatgttggggtggtcgatccaggcgtccatgatggtagcgccgggcatataggcgacaacctagagaaaaacattgtcaggcggcctcgtccactctcgagaaagacgttgccaaaactcacgatggtgttgggattgatcgaggcgacggcttcgatcaaggcctcgccatcgtacacgccgttgcggccgaccgcgcttcgataggtgaatgtgagggaaggatccctgtcgacctcttcagtagcccaagccgagacaaacaccaaggcgacgtcggcttgcacagcggattgcttggcggcgtccaagtcggtgtcgttgagtacccagtcgacggcagacgaatcgaccaacgccctctgtctgatcgacatcaagggatcgatatagttgagcgcctgtgcccaacccgatccacctccgagcgaaggaccctcgcacagcctgccggtggccccacagtttcggtccccgcgcataccaggtccggccttggatccgatgatggagatacgaggaggagcttgaagaggcaaggcgccgtcgttcttgagcaatacggtcccgtcctcggcaatctgcttgatgagatcgcgcgtggcgggtttctgaaccaatcggtaagggctagccacggtcaaattgacggcgggttggttccaggcgatgacgttggtagaaggcagggcggtgtcggcctgacccaaggcaaagtacggggtcaagaccctgacagccatgtcctctagacgctcttgagtgatggtaccgttgttgacgagggcgaccaacgaagtgtcaaagaatgtacccaaagcaccgccaaagttgaggccgggcatttccagatcgagacctccgacgacggaagcttccgaatcccacgtaccaccccagtcgctcataatgttgccctggaagttgagctcgcccttgaggtgtccgttctgaatgatcgagttgtgacaggcgtgggtaccgtttactctacgagcagcaatgacatgattgagcaacgatcaatggcgtccacctcggggaccctctggctcaccggttatatccacacatgaccgaaccgactcccgctcgtacggcctcggcaaagccccacatgtagacttcgtgggtggtccggtcgtcaatgttggacgagatgggcagctgggattcgagcgggttggtgctctccggattgggacgcaagtagatgtttcgcgaggtctcttgctcgtacccgaggaagtgcctatcagattccaccaccaccaggtcagtgacggcatctggccaacgacgatcggactcagtacgcacttggccgtagcgacgacaccagcgtcttgcattcctttgacgctgaggtagctcgcgatacccgtaccgtatgggtcggcccaccatccttcaaagtttcgtcccatgaccgggtttgcaccgataggtccacccgtgacgggagtcagagcgacgttgacacctgtgagcaccgggcgggtcggtcgcaagtctcaaccttgacacgcccggtaacgacgtacctagatcgtaaaactcttgtcccatcgtgcgggatcggttgtagatgagttccctgtcccacgtagcagcggtagtgacaccggcgggaaactgagtgtgaccatcggcaggcctaactccagcgggtccgtctgcggcggcgaattgtgtcaggttggaccatgcaaaacaactgatgtaccgcaggcggctcaccttgcaagcagagagcagggattccgagcctttcgaccgccttggtctgaccagcacaggctccgacttgaccagtgacgattccgacctgcaggattgcgggattgaacagctcagtctatgtcgcttttgtccagaaagacatgtgcaaacacgaaccttttcttcgaccgacatctgaccgacggcgtccctggctcgaccgtgagcgtcagcccaggccttgcctccagtcgatacgggagcagagatgttataggcaagttcattaccagtgaccgtctgggcgggatctcgggtgtagcgcttgccgggagcagccaaggccgaaccggttatgcaggcggcggcggcgagaagagtgactttgcgcatgattgattgcaagtcgaaatgtttggcttgtagaacaggagcaatgatcgacggccaagatggcgatacggacgacctcgtgattatatagtcgacatttcctcctggtctcgatgctatggcctggccggcccggcgttcggagcttgcggcgcaatgatttcaagaagcggcgcatctcgacaagatcctctatttctagcgcgagcagccatttccctgctggtcacatgcgaatctgcgtctcgggttgtcataccgagtgacacaagtcagtttgcgaacatgaagcacgatcgaaagaaatcccggggcggccgagtatgatccggcggggctcgatcgggagtgtaccatgcgaatttgttgtctcgtcgaggacaaagcatcgcaagcgcgcagcgggactttttcgaaacacgccgatctgcgtaaaaagaaataaaaggtggattggtcatgatcccgtctgacgaagtgaacgccgagcggcgcaatgtgatgacgtagagcacaccccgtccacttcgatcagcatgaacgattgcaaagaccagaatttggggtaccttccacacaccaacatccatatgcatccatcggtcttttccggggaggctgacatcgtggtgtgcttcggcccgatcctgccatatagttttgagaattccgtcgggaacgcttactccctcacgtgaaagttcacattcgtaatgaggagaatctgtttaaccgccaagatgctgttcacaggatgagaccttgatttcgggcacgccgttgcacgactcttgttcgactcctcgaggcagggacgatgagatccaagcgaccatgcgacaaaggcaatggcatagtagctcaacagtgagttctcaatgacaaccactggtagacccgcgtctagtcacgtgatctcttcgcttatgcgtcgcttgtaattgcgcggctgatcgattcgaggaacgcagcagagacgacggaattggtaccgggaataatgatttcatttcgccctggtgtcgctgcctgctacacctcacctcgccttgcggcaatggacgaccggttcaacttgcaaaggcgtgatcggtcggaagcataaatctcgccggatgatcctcgttcaataggctattttccgatcaaaaaatgttcgctagcgatgaacggatttctcccccaactttttcggttgatccggggccacgaccgggtcagcagctgtcatcgtattcgttggagtcccatcaacgacgatatcgaacgacatcacactcgactcaatacactcgacttggtgatcgaccgtcttgaatatcacacttcgatcgacaacaactcgtcaagatggagacaccccgtagctaccagtccgacgccgacgtcgaccaagacgtcgagaaaaagatcccttacgatggcgacatcgtatacccgtccgccacgaccgatgcggaccacaacccggtcatgcgtcgtcaccttaaatcccgacacattgcctttatcggtctcggaggtggaatcggggtcggcctctttgtcggagtaggcaagggtctctcggttgctggtcctctgggtctattcctcgcgttcaccatcatgggagccatcatgtggggggtcttgcagggagccgcagagatggccgccgtcattcctaccgccggtggatttcctcactttgccgctcgatttatcgacccggctctcggttttgccctgggatggaactgtacgttggagttcaaggtccgggcgctcaatgagtgattgttggctgatgacaccacgctcgcctttttgacatagacgctgttgggtgggccacagattcttcattgaaacgcggacaacaaccagagctgactttctttccacagatacgcattgtcggtagcgagcgaattgagcgcctgtgccatcatcatctcgtactggtccgacctcaacgccgccatctggatcgctatcctctgtgtcccctttttggtcctaaacatgttgggcgtcaagttttacggagaatccgaggtcattaccgctagcttgaaagtcattacgcttgttgggtgagtctcgtcggcgtgaatcgattacctcgcgcgcgcaccaggttgacatgtggtcgacctggacagcctgattatcctcggactggtgatcgatctcggtggcgctcccactggtgatagaatcggattccgatactggcaaaaccctggtgccatgaacgagcttcccggtgtcggaggtggtgccaaagcaaggttcctcgcctttttcaggtgagaataggttgtgcgctgcgtgtcgggaaacccatgttgaccatcggacggccgtcctcagtgcgttcatctcggccgcctactcatacaccggtaccgagacggtcattttggcggccggagaggcctcgaacccgtccaagcagatccctcgagcagccaagagggtcatgtacaggatcatcatcttttgtgagtaatcaaattgaaccctcttgatggacgctcggcctgacccccgactcggtcctttagacgtcttgggagtactcattatcggcatgatgtgagtcgagagttcagcccgtcttgccagcgttgtgttgacaggcctctgcctcgtagcgttcctttcaacgagcctaggcttctcggaggtaccgacaatgctgcctcttctccttgggtcattgccatcgaaaaggccgggtaagcgcgcactttttctcgcgatttccaggtcgacacgaagctgacgaactactgaacattgcaggatcaagactttgcctcatatcatcaacgccgtcatcttgacaagcgcatggtcggcgggaaacacctacgtcttcacgtcttccaggacgctctatggtctcgcccttcaaggtcacgcgcccaagttttttacccgaatcagcaagcaaggagtaccatggacctgcgtcgtggccgtatggcttgtctccctattgtcgttcctcagtaagtttgggctgattgccgccggcatttcgctcaagctgacccgctcgtctcgacccgttgcaggtgccggaagtggcggagcagctgccgcttttggttggcttcagaacttgactgcactagccgctttgaatgcttggggtgagtcacatcggcattgttacgaccgtcggacccgcactaacccgactctctgcctcgatagctaccatcgctttcgcggccgctcgcatgacccaggctttcaagaagcagggcatctcgcgcgacactattcccttccgagcaccattcgctccatgggtccaatacttttcctcgttcttctgctcagtcatcatcctgttcagcgggttctcagtgtttctcaagggaaactggagcacgtccgactttttcgcaaattacatcagtgagttcgggtcgaaacgactcgtgagctgcaaggcgcacgccaacgagcccctatttgcaggtctattcctgtacattgtgccttatatcggttacaagatcatcaaaaagaccaaggtgagcctcgactcggtctcgccgcagatgttccggactggtctgctcacacgatctgtttggcgccaatgcagtacgtcaggagcgccgatgccgaccttttcagcggtcgattgcgacccgaggaagagttcgaggaaaagcctagcacatcggtggctggacgagtctttgaccgattgttctagacggtggttgtagtaagggagccctggcggattataatcaatagatgtgcaagcgccgagggatcctttggcactcgagcatgttggtcccctgagaccaaggtgacggaactcctttgactgggctgaacggcccgcgtttcacgttgtgcgactatataccgttgaaagagtgctcgttcggaaaccccatcattttgaaggtgcacctgttgcgcacggatcgacatccgacctctatccgcttcccatatacgtgatggcaccgcttgtatcggttcgccgcgaacgcagacaagtaccagcgtgaggctgtccgaatcgcttttgcgtccacctgctgatcgtattctgctggtttcttccccccgtctagacctcaaccgcccgtgtatccatcacccgtcatccagccacagccgccaccaattccacctcaacctcaacagcctccagttccccctcccgctggcccaaatctgcccgttacttctgttgctcccggttcgcaacagatatcgcccgcaccgcttcctcagcctccatttccttctgtacctccgcaagtatcaccccctggcctcggacaaccggcgccatcgccgatgatggccgtgactggacccatcaccgcagcagcaggagtcgcggcgggagcttcggcgatattgacaggcgtaccgctagtgacccagacgttaaccgcccagcctacaggtggcagctatggctatggtcccaagcccaacgccatacctggaggagtattcggtcagcaagatccatacagcgcggggcaaaagaacgctactggatctgattcaagcaccgggatcgccatcggcgtcgtcttcgggttgctcgtcctggctgcaagttcagacctcattcttcgggatacggctttccgctgacacccgcttcatttactacagatcttgtgcttcttgcggtggcgatactggcaataccgcaagcacggcgggacaggcacccgatgggaagcctttttcggcaaatcgcagcgtaaagaggaagccaaagccaaggcggaacaaaaggacacgtggaagaattggccaatgttgcggtacgtccccaagtatactttcggcgacatggtggaggacaatgagaagaaggagagggaagaggaggataggaagaagaagatggcagcggcatcaaagaagtaatctgagggtggatgtctcggcgtttaaagtccatcgcatctatagcatctatgtcttcagcgcctggtcgattcggacgtgtcgtcttacaaacgggtctctgctttgcattcaaaccttggccaagaggcgtctattggtctgtaatcgagctgcgagattcggatcgatgaacaagctaggtccacgatgtacgacctttttcgactcaccgagcgcggcaaacacaccgccagcaaacgaacagcaccctgcaaatgtaatcacccacttccaatcccgagtttcgtctcgaataacgccagcaatggcggctccaaacaagttgggtgggatttgaaacaacaggatgaatccgagattcgtcgcaagcgcctcgggaccgaatatcgtagtgacagcgccagggatgcaaacttgaaaactggtggcaaactgcccgaaaaaggcagtcagcgcgaggcgagcccacgaaccattgccagccgtctcaccagcgcgagaatacaggcataagcgatgctacctgcatacgtcctcatcgtataccaaagagccaaggtcgtagcaccggaaagtgcccatcctagagcgagacaattgagcggacccaatcggtcgacgaggaagccaaagccgatccttcccaatggcgtaatcaaagcccagagcgtgagaggtctgttagatgatggtgagcgagtgaacgtagtacacagagttcagccgcggaccactcacaacgagctcaaaaccgtgctccgactcgggtcgagttctcgggtgtactgtacctgcgcctgaggtcagccaaggcaaccgagagctcgacatgacactcacaaagtaggcagccggtatgactgtaccaaagaacccaaacaagagcgaaaaggcgacgagccaaaacggtaacctcttgaatgccttgataggaaagaacggcgcgtctttatctagccgagcctcgatggtgtttcggttgcgtacgagtgcgatgccaatgattgtcaccgcgaggttggtgcacgcgatgactctggagtgatggaactggttgtcagccagtctgcccgatcttgcaacgatattcttcttacttgagcgtatgcttgactccgatcgcgttgatgagtgctgggactatcaacgagaaaacagcagcacctagatgcgggtgtcttttatcaataagccgggaacatccacgtgatggcacttgcttacccaatccgaagccactgagagcgactccgatcgcaagggcgcggttctgtctgagtgcgacggtcgctcggtatcagtcccaagatgccaaatgccaaaatctcgatactgacgcgtttgaaccattgagcaggagccgaaacgcatagggtgacaccggcgccttgtcctatggcggcgattgtgccctgggtaatgtacaattgccatagctgatcgcaaaaccccgccgaaaacatgccgatccaagcgagaaatgcaaagcaaacggacattttctggtcgagcagaggcggtcagtcgcgcgttcacctggctggtaccgagatggagcgtaccctatgcccacttgtggaatccacgacataagcatcgagcctagtaggaaaaaaaacgcgaataactgactatcgatcggcgatcctgccaaagatcacagtcccgataccaagaaactagaaatccaacatcagtcacagcttgccgcgagtggcaaatgactggccctcacgaatcccatgaatccaccaatcaagttgacctcaaaggaagacttgttgggaaacctctcggcgtactcggcttggtagatacccagagctgagactgatcccgctgtacatgcgcctatcatgatgcaggcaaatacgacgacatacccgtacccgccttcagggtatgtcgtttccaacgcagattcgtggtcgacaccggtttcttcgggagtagctgccaaccccaacactcgagcctccatacggggctcgtcatcgacatcgtcttccgtcagcgtggtcttgcgcttcaacacgtcgccatcgatcccgatgttcgggtccgtgtgccttgcgggcgttacattgacatcagcacgatccatctcgggcaaatggtatacggatgacttgcggcggatcgtcggattatcgttcggtacgagtcgatcagacgactcggcggtgctgatataccctcagcccagctcgctcgtcctagggctcacgatatactatgacaaagggaggtcaaagggataaacaggctaggcgtgaccaaaaatcgttttctgccatgtgtgatgggcgccttgtcgagctcgtcatcgtcgatgaccgcggcatcgagcaagggacgagtttcagttgcacacggataagccccactttgctgatgatcgccttgaccttgctcgcacggaaccgcacgatcctcgcgacttcctttgacaaagtgatgattacttgtttcagacgtctcgtttcagtcgggcgcgcggcgcaacaaaagcgacgggggacatcctcttcaatcttgctcgcaacgacgggaaagtctagcctcgtcattcctcatccaacgatacgttcccacatcgaatcatggcgtcggtgcgtcgcagtcgaggcgctgctctcgctatatggctttcactgaactttttacgcctaatcgggttgggggctcttctgtggaccattgttgtccatggaatcctactgaaaaggtcggtagggtcgccgctttttgcctcaatcccttgctgacgatcgtgtcttgtccagagatgcgacttcccgtacaggcctcgctacaaacgccgtcgcgaacgcctccataccgacatctttaaattccacactcaagttgacaccgacagaaatcaatacaccgcctccaggtgtcgctccggtcacctacgtgaccgtgccaaacccgcccgtcccgaccatcactaccgcggccaacgtgccgtcgcttctttttcccggtggagcggttccaacgagtctggccaccgaaccagtcattccaatgatctcggcgccggctgaagcagacgatcccaaatccaacctcatcggagttccccaaaagagggatattaaggacgaaagctcaggggtcgcgcaggagcagtatctgggagactcgaccgtaccgaatcaatcgggcggcatggtgtgcgtcgccgacggggcagctcccgttcatccgctcatgactctttccccgctgcagatttgccgtcgtaagccggatatattcgatcttcgctttgtcgctgctaggactggcagaattgggtgtcccagaattgttcctcctccagcacttgagcgcgatgagcctggtcggcagtcccttatggcttggccttggcaagatatggtcagtccaagctggcactacaggccgtttatccctcctgaccctcggggttgcaggtttggtgtcgatctccagcgtcacttgtaagcaagttgtggaaacacatcaagcgcgccgtctgagaaagactttcctgcagcatacccgccgacctcttgctggcgggacaaataatgatcgcttcgggcttattgaatgtcctagtggtgagtcgaaaaccgaaacttttcccctcgtacgccgaacgaatcgcattgcttgcatctcaggcgattcccctgttcctcaagcaacgccgcgccaatcgagtgcctcagttacgctctcgagaagtctactttgacctgaacgtatcgcaacgattgtgcttttggaaaccaattccagacttggcgtacatcctggcgtacgatcgaaagggtatgaatgccatccaggagagactgggagaagacacggacgatggcagcgccgagcaagacgaaaagcacgacatcgagtcccgagggagcgaggatcgggaggattaccccacgtttaccggcagagggttggaagatccgaccagccagatcgaacgtttcgaacggcgccttcgcaaagacgaacattcggacgacgatggcgatggcgaggaaggatatttggaagacgcgaagccggccccgcccgaagtaatgccggggatcccccctcaattgcagggcatggtgcgcaatgtccgtccgaggtttggcgctcccaccgcggcggtcccggccatcaacctgttacccagcacgccctcgaccatcgcctctagatcgaggtcgaggccgcaaactatttcgagtatcagatccggaggatcggatgtttcgacgcgatctcgacggatgacgctgattcaggaggccgctgggcgctttccggtgcctccagatcgcactcccgaggacgttaccccacgaagcaaaccgaaaccgcatctagtcaatcccaaaatggacgagtctcggttgatgccgccacggggacatagtaggcggaccaggagtgaggtatctgaaccattacgtccggttccgagatgcaaccccagtgcacaagacgtccaggacgaatcgcaagacatcagccagtggaggatgcccacaagaccagcgtcatccattaagccacgccaatctgtcaggttcgatttgaagcgagcgtcgtccgagtcgactagttcggtgcacgggccagcgcatcgtgcgtctacgtatggccaggacgttcgacaggaaaaaagcgattcgagggcgactagcgatcggtatggcgccccgcgaccgtatgtcgaggacgatgatacgtaaaagatcctagttttgcaggtcccgttgggattgtaatttcgtaaagtttcgtagcttgcaatgagacaatgctggacgcaagaggctcccccctggaggcatccgcgtccatcactccttggatcgcagcgaatcattcgggtccaaccgactgaccccaatgtgtattgagtagatccatcaagtgcggttctcgctcgagcaaagcaaacagatcgacttcttcttcccccggggcggcatactcgggcatcgagattggttgctggaaaaaacggtcgctttcgagcatatcattgcgatcatgatcttgcccgtagtccccctcatcccgcagcctgtcagtctttgccacctgctatagccaagtcagtctgcgaccggaatctgatggggatcccatcgatactcaccgcatttgacgactctggcatctcgttgctcatgtaaatataccgccgcacgcgttctcgttcgagcatgttcctgacgatgtcggctgccttgcccatggctccggtctgcggcacctcgctgtaaggtcttgtccatcagctgcaatacttaacccacatgcggtggctcactctagcagtgcaattcccctactgatcaggtcgaagagcgttcgagacaaactggccacagcttcatggcagagggccatgaagcagacgatggtggcgataaaagtcaggttggatgccctcgaaaagttcaaaaaggcgtcgtccagttgaatacccttttccatcattgtaaatatccgctcagccgcaccgatacaggcttcccgggaaggagagtagatgtcactgaaagccgacacgtgtcaacgccggcaaacacgcatattcggcgatttcatactcacggccgagcatatgccaatcccaagaacgggcgatgcatctgtagggcgaacagatcgagtgagatttcggtccagatgacttcccggcagctatgctcaaaggagacgacgccggtgtcagcaagctcacgaggttgtggccgtatggccgcgcttacaaggtggtatatcgcgagtcatccgccttgatgccaaaggacgtccatggcggcttggccgccgctgctctatttccttcctgtcgtgtatgcgctctgagacgggcggcaaccgttagcccaatcctcctgcacactcgcgcctcgaatcggactcactccaaaacgtcctcatacatcagcttgcctcccgatctgcaagcctgatctgcgagatgacgaaagtctgtaaaactatcatagccttccagcgaataggtcgtgtcctgtgggtgaattggcattagcaagagcagtgcgaaccatgaatcagagcgacgcaccgtgtaaatgtgagacggtctcgaaatcaacggccggtcctctttcaagtccgcgtcattaatgttggcaggtcgcacatcggctcccaggaacggcgggatggacgccgcgaagtctcgctccagtgcggaaacgtggtccataaagacctgacacgcgttgaggatcagttgagcgatcatatgaggatgctcgtgcgtagacctactagcgaacaccaaatacgtcttccgacttcacgatcgatccgtgagccccagatatcgccaaatttggagacggccaagttcctgtcgagttccgcaggttcccggtccaggcgatgcagaccgagactctgcgcgacacggattgcagatccgagggcagtccaagcttgttcccctctatgcactgatgtaaggtatgggctggttatactgatggcaagaagatgcaaatgtgggcggatgaagagacgactcgagcgcgggcgatgccaacccacatgatcgtctggcagctcgccatcgagtgaatctgcaaccaatccgaggcttcctgggccgcgtaacagacctggtaccagtcgtgtgcgagcgcaatggcgtcgacggcgcttaggcccgcttgttctagggcgtgccggttcatcatacggagacccatgacggcacatcccatgtaaagaccgatgaatgcgagttcctcggctgtcgccaaattggtaggctgtcgaacccagagctgctgacatcgagcgtagaaggatggtttgtgaaggactcgagcgctgggagagggatccagaatgagctttattagtagcttgaaaagatacggacacgcacatgtattcgacactaagagcaaagtgggtcagcatgagcactctaggtccaaaagttggaaacaactcgacttactggttgatctgttcgagttcgagaccacctcgaaacgttagctatcagaggcaagacatcgctccggccgagactgacataataatcgattgcttgccttgccaacgacgtatcgggcaagttctggatgacgtgacccgcctctttgggtcgatgcgaggttctgcgcacattgtcctgtatatgcgattgaaacgatgtgtctacgccgacgatcgagcttagccgatctaggtcctttgaacgctcaaagatacacgtacgataggtccgaggcgtttcgggtggtctgggaacgttgccatcgcgtccaaacatcatgtcctaggcgaaaaagaggcgaaaattgagcgttgacaggcatgctctgatcatctccctgaccgctcacttccagacgcatcgaggcaccgtgatcagcgtcggcatcgtgagtcgatagatgttggaccggaacgaccggactttgattcggctgagagaaaagtaggccattatgatcactttgcggtattcccggcggcatgatgacggcttcgggagccggccaggtcggttgaagcaacggtgtcgaaagctcaggcgaaagagaagttatcctcgtttggctggtgagtcgtatcgtcagcactaagatgcgaatgacaaattcgtccgatatgacttgaatctcgctcacctgccacccgccaaacccttagtgtacacgtccggatcatccaacctggagatggccaaggcgagagcgctttcgagctgttgcactcggtcagaaagaatggtaaagtcggacacgtgggtatagcctctatcagagagcaagtactgtcaaaagtgaaatggtaacccggcccagacaacggggagtagacctactttggtttcggttcatcctcatcatcgaatcctttgcactgatctccctttccacgatctttacatggcttacagggacgtccacgatcgcactgatagattcgggcagtttgaaaatgcactgggctggttcacagcagaaggttctcaccttggactttcgtgatctgcaagctgacgacagggaacctttcaggcggagactagaacgctgagcgagttgtactcacctgtacagctcaagacacctctattccgatgaacgccgtcgttgacctcattttcaaagctataagtttgtcggggctgcaatgactcaatctttcagacaatattttacgggatcatggttgctcgacgtcgctactcacggcgaacctgaacccgggcgagcctccaggctcgttgcatatcgagcgtgtacgtcttcttttggctggccgagagccggcttgattgtcaagagctgacatttggctgttccctctgtcgatgtgtgcaaacggtgcacaaggaataaggccaaggcacgagtaagcagcttcaattggctcatacctttgatcgatcagatcaaccaagtcttggctactgtacatatatgtagatagctgtagggtgcctgtttaggcggagacgaccgaattgagcggacatcaggtgattttttgcgttgataatgacgcaattgaatcgttacgtcatctcaatcaactcgtctcgatgtccgtgaatcggacgtcgtcgcctaaatagctgctacttgatgcaaatcatatctcttcacctgtgatctctttcgtcgtgtaagatcgtgcgaacggcttcggagataattacatctggtccagtgctcggcgtactgagatctcttgataaaacaccccatttgcatctgaatcgcacaacgccgctatacatgtacagttcactcttaatcaaccttgaactcaggcatcgacttgggcgtccctctgcatcgaggtcttgtacccagcaaactgtctcgtcggcaacttagcctcgaacatctcgtcaagctcggcgaacgatcggcctttgagctgttcggcggtgaccgcgagccggggtcagcttctactttcacgacctcacacttgaaatcactcgcctcgggcacgaagaaccagatgatgacgagtccgaccgagcatagacctccaaagaagagacctacaacgagaccgtcagcaactggagtctcgccctcgagacgtcaatcttgcaacctaccaatcttgattccccaattggcttgctgcggggacagcatgatgggtacggtatagttgaagatcagaccaaagacgcaggtcccggaagccgcgataccggccgtcttggctcgtaaacgaggcgtcgccgtctcggccacataggaccagcctatgatcaaagcgtcagcccttgtgcaaccaccattgacaactcgaacgacgactgaccgagaggacccgcagaaagggcatacgctgccgtccagatacaggtcaacgcgaccaaagccgcaccgggcaaggtcgccttgaagccgagcccgccgacgataaacagacagaccgccatgacgatgcctccggcgagcaacaaaggtcgtcttccaagcttttctacgaatacaaacgagatgatgatgaagagcagcaagatgcctgtgccacaaagacgattagcatcccgtccggcgtcaacgtttccagcgcgaaacctcacaggactggatgagactagcctcgaacggctcgtcatacgacgccaattggaaaaagtaggtcgaataaccaaagaacagtccgataccgaggaactgtcgggcgtgggatactatcaatacggtttcgcgaggtgtctgccttgcgtcacaagacgaccaacctgctgaaaggccaagggcaagaacgagataaaagtccgtcgactatcacacgttcggcgtcagctcgtacgatcaagcctcggtcgactctagaagactcgcccgttactgccgacgaaacagtcccggtattccgtccaccaagctccagcatggtcccgacgctcgacttcgatggtgtcggccatttgagcgtactcttgctcgacgtcaaacgaagcgacattgccgtagagcctttggagtgatcgttttgccttgtccgcgttgcctcgacgagcgtggtaccctggcgagcacccgaagaagcgactttagccgacggattcggctgcgacaccattccggcatcgactcacagggcgattccggggcaaagacgagcgcgggtacgaagagaccaagaagcacaaactcggagtagaaagcgttgcggtagccaaagggcgtcgacacgttgacgatctgcaagccgacggaacaagcgagctggccgagaccaaagaacaacgagtacatggccaggagggaccctcgaatgcggaccggtctggtggagaaaccaatgtcagacagtgatccggctttggtagctggatagcctgcactcacgcgatctcggcaatgtagacggtgagaccggattgcgtcataccagtcgcaaggcctgttggatgtcccgtacttagtgatcactcgaaggctctacgagattgaaacgcccgacccaccggccataatcttggcgacacaccagacttgccagtttttggcgacaatctcgacaatgatggcctacaagatgcgtagtctcgtcagccatgtcattctaatttagtctgccccttcatgggacttacgatcaagagtaccccggccagcgatatcattccgactttgcgacccagcttgtcgctcacaaagggaccaatccacatgcccacgatctggccagcactagatttcgtttcgtcaaatctgggcccctcgagtatgacaagcgggggcgccaactctcaccttccgatcccaccccacgccgagacgtgcagggcgtccaattcgaccaccgcttgggcgttgtttacggtcccgaattgttgtatgaacccggcattggcaataatgctacccggcactgcgagattggtcagatcgtcagttgcaactcgtcaatgatcgcagtctctgctttgacgtactggttaccgcatatgcgtcaaagatggcaccaacggcgacgagcatgctgaacatggtcgctttccaaaacgctcgagccgtcttgagcgtgccgaattcgaggtacgccggggcatacgctgggtcgtggtggtaatgttcgagctgctcgatggaaatctggtccttttctttgtggtcgcccaagggcgcggcgatgatgtctgtcattgtttggtgggatgacaatggcgatcgtgctgctgtcagtgctacaactcacgacatgaaacggattagaggaaatggtctcctcgtggtgccccgtatatatgccaaggttcgactttggtcgcggaagcgaatccagctgatcgacaaccgcgagcgatgatgctacgccgagcagggcggaagtagacggtctccggatttaagaccccggttctaaagtccgtcgacacatccatgaaagctggacatacaactcagatggcctgcttcgcctacctgcttctttccccggcgtatcattcagcgagaccttccgccgggcggctttgcatcgcaccgtctttccagcgatgcttcgggtgtatgacccgaggtcaggtggctaggccgtcactacatgtacgtggcaagcggccaagtctccatggtggctcgcctctgtcgacccacgtcgtgtctctgcaagcgaacacctgtagctaaaacaaattatgcccattcctctcaacatcagtatttctcgtgtcacggcggagcattcgtatcatgggactcttgtagccacaccgacaccaaggctgtcatggcggttcgcaggatcgcgccgggattggacccagcaggcatataccgccagactcactagtgaggacggctcgatcgaggaaaggcacgttcactcgtcctcgtcggtcctggtcccttggccgttcacgaaaccgcttgaatcccgtgagaaggtacaggtcgacgtccagtcttttggcaccgatggtagcatcaccgaatggtcgagcacggacgtcgaagtcggcatcctcgatggctgcgaatggtcggacgtgaaaatgatcagttgtcaccagcctgaacacctcgatcagccacaacgtccattccaagtgaggtcgtcattcagcgtcaactcgaatggacgtgatcatcacgcccgcgtttatgccacagcctacggggtctacgagctcgagatcaacggtcaaaaggtcggagaacaggtcttggcgccagggtggaccgtataccatcaccgcctggcctaccaaacatacgacatcgcgcacctcttgcgtccgggcgacaacaccattcgcgcgtgggtgggtccgggttggttcagtggccgtctcggatttcttggaggcagccgcaacgtctatggaactcgcaatggactgtttgccaaggtcatgatcgatggcgagacggtcttgacgacgaacgagacgtgggaatgggctcacggatgcatcctctcgagcgagctgtacgacggcgagacgtgtgacatgacactcgacaaagcgtcgaccacattgcgaccggtcgaagtattgccgtctcccacggccgaactgtttgccgaaaggtcccctgtgaaacggatcgagacggtcgcggcaaagagcatcactcgatcgccctcgggcaaaaccctcgtggatttcggtcaaaacctggtcggctggctgagggtcgaatcgcatccctctggaaggccgggacacgtcgtgtcttttacccacgccgaggtgcttgaaaatggcgagctcggtacgcggccgttgaggatcgccaaatgtcgagatcaggtcacactgggagatgctagcctggtcggatgggaaccgaaattcacctaccacggcttccggtatgttcaggtcgacggctgggatctcgatgtgagcgaccttgtggccgtcgtcatccacaccgacatggaacggctagggcacttttcatcgtcacacgaaccgatcaatcaactgcatcgaaacgttgtctggggacttcgaggaaactttgtttcgatccccacagactgcccgcagcgggacgagaggctaggatggacgggcgacctcgccatctttgcgcgcaccgctgggttcctctatgataccacgaacatgttgggaagctggttggaggacgtcgctgtggaacaattacgagacaatgacgggatcccttcgctagtcacccccaactgcctgcgtggagaacatggcaagccgataccgacggcgatctggggcgacgtgacggtcctcgccccgagcgatctggccgatgatagcggcgacctggcgatcctcgaacagcaatacgtcagcatgaagacctggattgaccgcggaatagtccggggcgacaacaggctgtgggacgaggcggcattccagtttggcgactggctagcacctgaagctcatcccgataccccaggcgaatgccgtaccgacccgcagttcgtcgccaacgcctacttgctgcacgtcacccggcgcatgagcaaagtctgcctggcgctgggcaagaccgaagagtctagcaagtacgcgcaagaatatggtcgactctggacggcgtttttgaacgagttcatctcgccaaacggacgacccgtgtcggactcgcaaacggccatcgcccttgcgcttcattttgatctcctcgaatcacctcgacaacgccaagtggccatcaagcggctcgatcacttggtgaggaagaacggtttcaaggtcggcaccgggttcgctgggacgcccgtaattctagacgtcctcgccgctcacggccgtctagctctggcctaccgtatgctcctgggaacgcaatgtccgtcctggctctactgcgtgcaacaaggggcgaccaccgtgtgggagaggtgggacagtatgatgccggatgggtctatcaatccgggcgaaatgacgagtttcaatcattatgcgctcgggtcggtggccaactttatgcacgagaccatcggggggttgcgatcagcagattcagggtggaaacacgtcgtcattcagcctcaaccgggtggtaccgtcacgagtgctagcgtgtcgcacacgagtccgtacgggttggtcgggtgcgagtggaagattgtcggagacgccgagttgatcgtcgacattgtcgtcccgcccaacacgacggccagggtggtattgcccggcgtggacgagacggtggggagtggtgagcggaggtttgtcgtcgcctggaaaagcgatccgagctggccaccgagtccgatcgctagtcagggattggtgccgatggtggacgagtgggtgtagccgggatggcaatacatgaatcatcacgaatgataatggaatggctgctcagctgctggcttgggaccgactctgtccatgattcgcagacccgcaacctccaggatgcgccacagcgctaagcgattcgaaatcgaaattacgacaacgcaggccttgccaaataacataatcgagcgatttcttgtctcatttcttttcatgctttgtttacactactactactgtcttcgtatccatcttctattcctcctgccatcacctgaacgcgaatcgaaatcaacgatccactcccgaggtctgccccaacgcgtagctctatcgactcacctttggagacggggttccgtcacatgggtggggaccgacgatctagtgctgaccggcgttgttggcagcgttctcggcggccttgtcggctccctataagagagagttaggtgcgatagtgcggatttgttcagcaggatgttctgccacggaagggattgaaagggaggtgcgggtggtggcgaggcgggatgaataaggcgagaaaggaagaacaggatgtcctcgaccttgacgcctgtcgacattttggtaacacgaacatcgacttggtgaacgagacggcgttcggttctcactcatcatagccccgacgcggtccacacacctccccttgcgaccaaagccgagactcaccttgacggcctcgtcagagacaccagtctgcttcttgtctacgaaaaggaataaccatttactcgtcgtcagccttgctttctctgcatcgatatcgcactcgcgactcgacgattctatcgattgtgaacttacccatggggtccttggtctccctctcaccggcgggaggggactgagctcccgagttgagttgttcaggctttccggacatgttgatggggttgtgtatgtagagtgatgtgtgtgttgtgatcaggagattaaggacagtcaaattaggaaaaattgttgcgttgttgtgtgtgtcactcctggaacgactttgaatacttgaacgacgttgacgacgacacgacacgacacgacacgacttggttggtagtcatggtcgagggtctttcggttcggggggttccagctctgacgtcattgatttttcggttaaactcggtccgatcgtcggcggaaacgcggcataaaaggaggaaaaggggctgcgtttcagtttacagttgcaccgcggatgctcgtgatcgatgtcgaacgaaacacaggtcaatcaataatgttgggacatcgtcgaactgtagtcgcagtcgtgatgacttccatcgctcgttcaaatgtgtccaggccaaggctcgcgccgtgatcattgcaacactaacccggcttactcgagtatcatcggcatcggctcatataacatccagccagacgcagctcatgatttcaagatgatgtaatccacgttcgatgatcgcgctagaagaaacgccaatagagcgattagttatacaaccgagatgcaacatcatttctgatcaccaggagagaggtgacacttatacacgtgtttcacaagcgtcatagagtttccacacaatacacgtctcacaatgaaacgagctggctcatccgaaaaacggcctataaaccagtcctggcgcgacccactaaatcaccctcacatgatcacgcagatcggctcgacgtcttccggcttgggttgacccgggggtggtggcggttcctgtatcgagaccggggtgaccagacctccaggtatcttggttcctaccggccaagaacgacaccgcgtgtcagatcgaagagggaacatcagcatgaacggtttgtaactgggcgactctggtcaaactcgcgctcacccgggggtaaccaagtcggaaagtctagcacggaggacatggtgaatacagctcctccgggcaagatcgtaccggttggcaagctaaatgcgatgtcgataagactgatcagcgccacggtgacgattccttctcaggacgcggcctcacaagactccttcagttctgtatggcaaaccgagatgaccccagatcaataagcctgtggtcacttctgtaagacgctagatctcagactcacatcgtatgatacgcgttgtacttgatcccgtaactgccaagaccataccctcgatcagctgccatgaccaccgcctacctagttcacctttcactcacccctcgggaatcaatgactcgtcctgcgatgcctctacagctaccgcaaacggatgcggagcttctcctgccccttgacccggagtctttagtttctggtcgtacgtcttggctgccgaagaagacatgggttcgatatgatgtggcgagacggatcggtttcggttccggttcgaatgtcaacagaatgctacattaccgtcgtcttatggactcttccaggtcgtctcatcatcttctgaaacggcggtcgaccctcgcacgatgaaaggatcgattcaaggagaagctggccggggggacgcgcagggggctttcccggtgctgtagacccaaggcaggaaggatctcatgttgaacctcagtttgagagctcatcgctcattctctgtgatgtggtcctcgcagacgattcccttgcattttgaagagattcatgggctgatatcaggtaacggcagaaatgcgttactgtacgaaaccccaaagtccggcactgtagtactcgcctcatccacgccgcgcgcctcgagatcgagatcgatttcgggtttctttgaaggatagactcgaaccttgagctgtaggcacaggtcaacgtccctgagtggataaagagttacccctttgactcggaacggacctcgttatcccgagatgcacgatgacgaacgaggtcgatgacaagcgacaaggtcccgctggccgttagcgcgccattcagcttcattcctcgtctcaaaccgtttcgacccgagttcgagccgatgcgtagggtaaggcgtctcgtttgaccagtagacgagcgattcccgttcgatccctgagtgagtgaacgcaaacacatacgaaatccgaagtcgtcttctgaagccgaatcttatcagataacccgaaatgtcgattcgaactcttggcgtgaacctttcgtgaggctttttcactcaaacgcgcttggcatagttctgatgctggtttccacccatatgcaaggtggcaactcgtacgggccaagtaggaactcaatttcgacggcagcgctaacgtatggagcatgtcaaagtcctgcttcatgcaagccgaaatgtccgatgcagggatgtcgccgcctagatggcattttagtggtgcgggtgcgagccgcgattgcaacgagggaaactgtacaagaccattcttaggatcgatatataatgatgcgtattcagtgcgattttcgacttgataatcagtgtaacttatacacctctcactaaagcactcaatcactatcatctccaggccttacaaagctcacgagccctccagtctcttacgatgttcgcctctgccgtcctccttgtcgccgccttgcccttggcctttgcgcaacaagcctttgttcccgccgaacccatccgtaggtcatgtcctccctggaacgatggggacccttcttgctgagcacgtccgtttaccagtctccttcaactaccctatccctcgaggtaacgcgggcgaggtctccagcattgccccttgtgccggattcgctcagggcggacgattgacctatcccttgtgtgagtatcagctttggcaggatcagtgcctacctccgtaacagctgctgaaccgatatgctacagccggaggagacgtctcgatcaccgccatcaaagacgccaagctgctcacctttgcctactcgaccaacgccgatcctcaggcggcgagcgactttacccgaatcggtggcgatttcgaagtccagcaccgaggctccacctgtctctcgttccccgacttgggcgccgcaggactgactgccggacaaaacgtcaccctgcagatgtactgggaagctggtcctcgcaactaccccggctatgcctgcgccgacgtcaccctcgtcgataacgccgccgaactcgaccccatcaactatacctgcaccaccagctacctgtccactcagacccgaggcaatgccaaccccgagctgaccaagctccgagctgccgctgaatccgaattcaacgccgctcaagccaagtcgatggccgaggccatctggcaatacggtcccggtggtctctctgcgcccgctgccggtgggatcggtgccggtgtcaccctcgccgtcgtcgccctcgtcctggccgccggttgggctaccggagccgtcgcctttggtaagaggcacgccaaggccttcaagcagtcgagcggacatcccatccaggagaccaagtcgatcacctcgagcgtctaggcgcgaggtcaggctccaacaacttataaacggcctgtcggcaccgaagcgtgcgttttcatatttgccctagcagcgtagtagtagattagtctagaccgtgtcttctttccccctggccatatacaatcccgaatgtcattctcatttagcacggcgtttagcagttggctgactgacaacgagcccgacctggacctagaccctcgacggtgttgactatgtttgtgaacgctaatctcatgagaatatttggcaaccaggccgggatggtgtaacatgcagaccgtctctcgcacgatgccgagggaggccactattacatagatgctgggaacaggagaggtaaaaatgtataacgggattgggaagaggggacaggagtcaaaggcgatataatcgagagtgcgggcgggcgtatggaaaacaaacgtccgttgagacgcgcgaaaagaaaaacccgtggcgtccaggtcacgctgaacccgctcaggcgctgttggcgtactgtcaatcgtcaagcggggtcgatcgtcagccgggaatcctacgcggagctatctgactctgcgacgactagcactcacccaagctccgaggggagtgatgccaccactggcatccatgagtcggttggcttcctgaacaccttgcatctgtaaacgcagcgggacggtgacaaggtcagctttttcgagcacaacgctgatctaccacgcctgactcacgttcttcatggcaccgaaaggactgtacctgtgaacccaatcctggtcgttgaaccaagaggccatctcgtagtgaaagttcatggtctcgtcccagttgcactgagcgcctccgttgaagttttgacaggcgtactcggtgatccaaatgggcttctggacggcattgtgatagtcggtgacgtattgcttaaagtgatcggtcgagacgtcgtagtagtgcaaggggacgaaatcggtctctgcccagcattcgggacaaatgtctttgaacttcaagacccattgtaaacccgaaggagcgctcgtggttgcggccattccgatcgagtaaccctgagccttgagcgggctcatgtactgcttccaaaagctgacggcgtcctcgggcgaaatgttggactgacccgggtcgttgggttcgttgaaaaagaggacgtgcttggtagtctcgggccacgaggattgagcttcgtagaatgcaggaacggcgtccttggcgccccacatcatgggaacgtattcgataccgaggtccgagctacggcgtgggcgtgggcgtcggcgtcagcgcgggaggagacgggacgagaagactacggcgagacttacgcctttttgcatccctggtagtgccaatcgtacatgaaactgacggtgcttccgataaagttgcccacgtagtcgaccgcaccgggttcggcctgacacgattgacacaaacacgcaagacgacgtccggtgtcagcctttgaacgacccatgtcccttttgaggacgacgaggataaactcacccagtcaccgttgggccagcagaggccgaccttgcttcccgagttcatccaaccaccgttcccggcggcgggggcggccgaggaaggcgcggcgggttgaacccagacggacgaggtggccgcggtaggttcagcagcaggggcggacgaggaagcctcgacccaggtggaagacgcctgagcggtctcctggggtgcggcctgggtggaggactcgacggtcgaggactgagcgtcggtggattggacgtccgtggcggtctcctgggcggaggcgacggcggtggtcgatgcggcgacggcactcgagctcaagccttgagctccggcttgcctgatcctacaagtctttccaccgccgggagccctcttcttgactcgcctcttggcatcagcgcggacggctcggacctcgttgacgtgatcgttggacctgttctgcagtccgttcttctggagtcgacgtgcgaggtggttgtggttgttcctaggcgagtgggagagcgaggcggcgtccgcggtaggaaccgactgtacgatcgacatcaaaatggcagggcgatcagacgggtcatacttgatgacagccaggcgtgtatcactcacggccatgagcatcgaccccaggatgagcggggaagcagcgaggtattgaaggattccaatcattgtgaattgtcgtttgttggcaagtagtgtcggtaggtgtgtttgaaacgtaaagtgtcgttcgtcgggtcgtctagtcttgctaggtggttgagagagatgtagactagttcgagtaggcgaaagagttgtgcaaacgagtgtaaattccgtcgatcaaatgtgtcgatcggtagggatggttggtttcaaagagtgtgttgtttgtctgcgaggtgtggcgagtcgaggacaatgtcgaaattcggagtgggggatagagcaaacagcaggggcgggacgaagatttgatcagtctacgtgattcgtagggttccgaagagacgtgacgtgggaatgagatgtcaatccagagacacagagaacagttgaaagaggtcgaacgtcgaggaaagtgtcggtagtttggtagaacaatgtcgagagtggctcgatgtggtgagccgtgagttgttcaagtgaaagccagtggttgcatgtgtcggtcttttccctcttttctacttcttggtggtggtgtgcgaggtgatttgatggggacgacccgtttcgatcaaaatacgccaaatctggttgctgaaatcgctggacgtccgtttctcctttactctgctctcctatccacctggccacctatccagctatgtcgattcgactacatccatggatcatctcccatcgtctcccatcgtcgaccatcgaccatcgacctcaaaccccccaccccctcccgtttcccattcctttgtctcgatccccctttttttcccactcgattccaccacacaaaaacacgaacggacgcgcgaaaaccgatgcagagctggacttaccggttcaatgagtcgttggtcgtttcttccgtgtcgccaggagtagggttagtagtgagagtagtcggtggtagtagtgatagaatgtcgtcttgagaaggatgtagtgattgtgatgatttgatgtaggtcgacgacaacgacgacgacgaatgcccgtgattgatcgatttgtttgttgttgttctcgttttgttattgtctccgtcctttcttaccgtcgcgtgcgtgcgtgcgtacgtgcgtaacaacaagggaaaaacaagggttctcttggcacaacaatcaatgaccctcctcgacacatacgtcagactcgttattgtacaatcatgaatgaacaaggcctgcaggcaaaaacgaagacgacgacgacgacgacgacgatacacttctgacaaaaacggatatacacacgcctacacacacacacacacccatcccccaccctggaggtctaggctctcccatcatcacccaccccttccgctccgttggccccgctcacctcgacccaatcttccaatcggttcaacccgcccttgcctaatcctttccactgatgcaccgcgatatctccaccggcgtgtcgttcccaagcagtagagatcatggacggttcattgccgttccagctgcggcgtgatccgatcagagaccgaggtaacgtgatgtgaagcacacaaaggggcaaaggacgcgacgcgcgcgcgtgaaaccggtttccttttcgttagctcgagctcgaaaggacacgcgcggagcgacgtgcaccgcggatctcggatcaacgttggactcacctgacatccctgaccgtacaattgctcgctcccttgggatccggatcgtactcggtgactacatcctgaggggccgaggggtcattatactcgcccgtgaccgcgttgacgagcggttgagcctttgtccggtcgagaactaccgtcgtcgtcgtggtcgaaacgcaaacgctgagcgcccggtcgactccgccctacggcgcatgcgactcaccctggacaaccctcccgtcgaggtgataaatccagatgatcccgttactaccccccgtgtacacgtactgcccaccggtactctccaccggactgaaatgacatcggatcagggtcgacaacacgtgatgaccgcggtacgtcatgaccgagcagtcgagcgggtgagcttcgtgccggggtttacggtaatatccgctcctgcaatcacaagagtgttcgatgatagcggcgacgacgacgacgacgacggcgaccctggtcagccatgtcgaatgacgagccgcgcgggagatctgcgtcgacccacctataatcccaatcacggggcagaccatacgccaccttggcgttcggagcctcttcgttgagctcgttccaactcctcattcgacggagatcccacaacctcatcgcctggtctttcccattggcgatgacgtatctcccgtcacccttggaatcgacataggtcaaaccctcggtcgcacccgccaacaccccagaggggacggacgagccgatcgatcggcggtccctacgagccgtggtctgtggtcagcctggcgcgcctcgagtctggcatcatctctccacggccgtgactcaccagaccttcagatagccgtcgtccgaggccgagacgatcacgttggtcgaattttcatcggcgaagcataccccattgactgtgagcccggcgcgcgtcagcctccgagtacgatataggagtggccgccacgaccacgtaccatcggcattgtgcgctctaatgttcaagatcctgcgcttggcggcgatatcgtagaccatgatctgacccgatccggcaccggcgataatctccttttgatcggccgagaacctgatactccagatctgattcgaggttgacgtcagtctgtcagcccaggtcgacccacgtcggcccgtatcgactcacaccaaactcgcgcatgtaacctctgccaccaccggctcgctgcccagattcggaaaagtcgagcatcgtatgctcgtgttcgtgttcggcggtgcgcaagaggtgcacgtacggcgtgatagatgagtagatcatcctaaacgggggtcacaagcgagtgatcagcttgtgtcgttcctccaggatgctgagcttcgccccggactcgacttgccaatcgttgtcccgggacagatcggcgtccgtgacggtccactgtccgtgtacaccctgaaccgtcttgatctttctcagactatggtcgtctggtccgtcctcggcgtacccgcgcgcgtagatcgaacgtcgaggtcggacgggcaaagcgtccgccctgcctctcgcggcaagtctcgatcggggtgcgtcctgtgtcgagtagaggtggagtttaaagtcttgcgtggcggtgtaaaagaacgagtggtctatgcgaggcaagcggggtttaggggtgggcgcgatgaccggtcgacacgagacttgccgtgcgaatgttgtccgatataaggggacgccgagtacgatgccacgatggttccgttggtattaggcaagcatttctatagcggcacatcaggacgaccatcagctcgaagttttatccccacgctggagcgaagcgggctaccgaccttgctccactcttccctcccgctagacccccaaacgccccttcccgtctccctgccgaaccctttcatccccttgacccacggtccacgcccggtgaccttgctcttgatccccttgacccgtccgtcgtcctcgatgcccatgaccatgctcgccagggacgaggcgctggatctcctcactctgggcgaggtggtgaggttgatcgaggacgaggacgacgtgcatctgcgggtcttgccgcctcgggtggccgtcgtcgtcgggctacgtgagaggtgggtggcgatggtactcgtcgggctcgtgctcaaggcgtgttcgtcgtcgcccgcatgaagatcgagctcgtcctcgtcgtccctctccatcaagacgtcctctgccgctgacctggatccggacctctccgctctggacctcgacttgatggtgctcctcgtattcatcgtcgcgtccgtctcggtcctgacctcttcgccctgtgggaacccgacccttccaaactctcctccacgtgcgagacgtttccccgcctctttaccctctcgttcgatatcgaaccaatcccaccctctcaacctcccgttcctcccgagcccaccccgccggaacctcccaccgccaaagacgttgtaatcgtcatcgtcatcatcgtcctcgtcttcctcgtcatcatcgtcctcgtcccattcttccccatcgacatcctcgtcgtcctcgtcgtccgctcccaactgtcgtgagagcctggtgatggcttcttcgggcaagagaccgctggcgaacaatgctcggaaaaaggcgtgcgggacgagtacggtgccgtcttcttgcggttggccggacgagcggatcatctcggccagggcgtctatcgtgggcagggcgtcgaggtcgatgcgggtgtgagggaagagatcggtgagtgaggttctgatctggaaaacagccggggctgatactcacttcgcgcactgggttgaaggtcgagttcgcctctgcccgaacctcccgatcggggtccaactaggtcaccctcgtcatcatcttcctcttgctcgccatcgtcatcctcctcgtcgtcctcgtcgtcgtcgtcatcatcgtcctcgatctctagatccattccctcattcctcctgatcctctgcatgatcgtctcgaaatcctgcgcctcttcgtcgttcagatcggcctcgtcgtcgtccgcgtcatcatcgagatcaaactcgtcctgcccatcgccttcatccgaaggtacgaaatcggcatccatgtcgccgtcttcatcctcgtcgtaccactcgccagggtcctgcatgcgtcaattacgagcgtgtgtatcagctgtaggtattcagggtcgaacgtgcggttggtactcgccatgtccgacatgattcgatggtggttgacctcgggggtggatggtatgaatcgatcgtctcgcggcggtcggcaggttaggggtgatgctttggagtctagatctcgttcgatctggatgtacgttttcccgatcgtctgataacgttgcttgcctgcaatgcgtcacactgtagatggctgtacactgtcgtcgatagaggttgtagtcatatagttacaacgatgacctcggatgatgattcgatcactttcactcttcgctttcccccgacaaccaacctccaccttcgttgcgggaaggaacaagatcatcatccatgatcatctatacatttactcacaaccaccacccatctacgtccacgaccaccacacatggcacatagcgacgactgccgcctcactcgtgatgtccggttggaatcctcatcaaccaccggtcgatccccgtctgggccatccggaagcgtctccagcccatattcaaggcaacgcgaccccgatgagtcaaccatccatcggttcacctccaggaggacagatctacgctaccaccccgtacgccatgactcccggaggttcttcatttccttatcccccgtataacccgtccgcctcgccgtacaaccacgccgcctcaccctacaacccgtccgcctccccttacaatcatgccgcctcgccttaccaccacctccctcctccagctcaacccgagtacgtccccgagtacacgggcagtgacccgtggaaaatgtactgttacctgagagataaaggcctgttggacccttactggatcgcttgggccgaaagtcaacgtctacaggaggcatctcagcgtacgctaccaccttccatcgggcggggtcctcctcgtccgattccgttacggccggctgcaccgggcatgggaatgggcagaccggggcttggtggagggacgacgatgggtgctggggttcgacctgccgtacctcctcctcgagctcagccgtacgtcaaccccgatcgggagagacggatcgtgagcaaccctacgccttccgtcccctccccggcatcagcatcagcaccatcagcaccagccacgtctcctcctcccccatctcctcctcctcaaatgcacgacctctcccggatcaaggaagccaaagcccaggagtacactcgcgccctgaaagaatccaggcctctgaatctgaaagctgtcagtcaggcaaaggtccaggtacgacccgtggtccaacctcagtctcagactcaaccccgacccccttccacggtccaagggtggatcccggttcaggaaggttcaatctcggacgtcccagacgtcatcatgggtgaaccaggagccggacccgagccgaccgccaggctggatctcgatgcggaggacagcgtcgtttatcgcgtggcgcaacgaggcatctcgaacgagtgagtcctcgtcctcgtcctcatctggctgctagggtcacgtctactatagaaatcaattgatcgggatgttcgactcgtgcatagatacctcgctagcatcctcccgccctcgtccgacccgacaccggaaatgtcgccggaagagacatgggacacccctacgggtcgggtcaagaggttcttttacgccgagatggttttccagctcaaagaatctagggatcgggtattgcaggagaaggagcggaagcggggtgatggtgatatcgatatgcttggaaacgagcgggctcatgtggacgacgacgacgacgacgaccattcgaccacaggagcatgggacgaagccgagttgtggccagccgaagagtgcgaaaaggatctcgccgacctcggcgtgagatagactgcgaccaagtgataacggtagcgcaggaagatgacctacgaggtgcatcgaacaagatttaaaataacgaccaccatttgatgacccggacgaccgattgtgctcgacgacgtgttttcttgtaaacctgtagatgggtccgggcgagatgatagctacaatatgatacgcggccccaggtggcacgacggatgtggcccgtcgttcggcgtttcgccgtgacgtcgcaagggagtctcgcaattgggtcagtattcagccactatgaccaaatgggtctgcatcgatatagacctcgagggtagagagggaaaagagcctcgccccgagcgagaacagcgtgctctcgggcaagaatatcccccttgcacaggggatacaactcgctatcgagccaggttgacgtcctatcgactatcagacgagacctctcgctaacgacccaagacctctcgctatacatgggttccttttcccccaaggcccgatcaaggacttatgaacacctagacaaggtagtgtgtaaacagccggaaaaagttggtgacatttgcggggtctagaaccacggacgcgatccgcattgaatggtatcgttataccaacaccaccaccactccaccaccaccaccaccaccgacaaccacaacaagacaaaaacaccatcaactttccactttcaactttcaacatgattttagacatattactgctccttttctggatcaccttctggatcacttacttcgtctctgtattcgctatcatcctctttgttacgttggtgtttgcccgtctctcggaactcgtcatcaccttcagcagaccgttcttggacacgatcaacacgatcaacatgacactggcccaagtcgtgaatggtcgatcaaaggcggtcgagacggcaaaggtacggaactgtgataccaacaaagtcgggatgaccatggtgcattgcatttcatttcaagacatgtcgatcgaggggcagtccatgggtcacaacagttcacgacaagcgatgccctcgcgaccctgcgccgccgactacaacggggcgtcgtacctgctagcgggcaagatgggagcgacggacaagtaccccgtcaacctctccatggccctctcggcggcatcatccgcaatgacgctctgcttgccctctttcaacgtctcgggcgcggtcccatcgatcaacccgagctgagcgtcggtccaaacgggactaggtttggcttcctcgacggggttcagggcggacaggggtgcgccgacacctgcacgtccacctacggcttcccaatccttgatcctcttcaacccgagcttgtcaaagacggcctcgatcgagctgacgaggtgatccatctgttcggccgtgtggcccggggtcggggtgatcctcaatcgttcctctccgaccttgacggtggggtaattgatcgactggacgtagatcccgtgttcgctcaacaacgtgtccgaggcttccttggccaaggcggcgtctcccacgagaacggggatgatgtgcgaagggttgggtacgacggggatcccacggctctcaaacgcctgcttgacggcgcgcgtgttgacgtgttgcaatcgcctgtcgcccatgtactcgcgctggtaagcgatcgacgcctgggctccggcgacgatggccgggggcaaactggtggtaaagatgaacccgggtgcatacgacctgacgacatcgacgagatcggccgaggcggcaatgtaacctccgacgacgccgtaagccttgcccagggtgcccgtgatgatatcgatcctatcctggacgctacccttgacgggctcaaccgactggttggtcgcgtgatgagcctcgaaatccaaatgttcggcgacaccggcccctcctggaccgtacatgccgacggcgtgtacctcgtccaaaaaggtcaatgcgccgtactcttcggcgaggtcacagatcttttcgatcggggcgacgctcccgcacatcgagtagacgctctcgaacgcgatgatcttgggcacgtccttggggaccgtcttcaacttggcttcgaggtcgacgacgtcgttgtgcttgaagatgacctttttcgcacccgagtgtcggatcccctggatcatgctcgcgtggttgctctcgtcgctaaagatgacgcatccgggcaacttggcaccgagggtggcgagggtcgcgtcgttggcgacgtaacacgaggaaaagaccagggccgcgggtttcctatggagacccgcgagttcgtcctcgagagagaggtgcatggctccgttccctgcaatgttccgggtgcctcccgcaccagctccgtatcggttgagcgttttcctgtcggggcggggagaggtcaacagtcaatacgggtgcacgtgccgcagctcacacgccatcgtcacactcacttcatggtatcgagcacgacgccgttcctgctcatcccgaggtaatcgttggaacaccagacgtcgacctcgtccttggtatccctcgtgtgcgctacggggaacttggcggccagtcggttgatattgttgaaatacctataactcttgtccttgtgcttcttttcgagctcggtctcgtaaaagttggagtaaccgaacgtgtgcttgccggcagcggtggtggacttgacggcctgggtgacgggagtggtagacttggcctttttcacggcctgggcctcggaggcggcgatggcggcggcttgggcggcggccttggcgtgaggacacttgcctgggtcgcccgaggtagggtgggtaaagggaatgtccttgttctgatcaaagaggcgacgagcgaaagggagaatgaaaggcgaatcgaagtgcggggggaaagcaagagcaaaaacacgtcacgacgatcagtcactacgccccgttgcccgctcgatctcgatctgctgctgcgcgcgcggctctctcgactgaccttgtgcatctccctgacctctttaggtccagcgacgctggccataccccttacgcctcccaattttctggcgacttcgggacccatgatcgggcaggcatcgacggctttggtggccagattgctgacctgcggggcgagcgggttcggggtcgaggcgagcgacctgagggtggccgtcgaggtgcggtggaggaatggacagttggtcgagtaacgagccatggatgtcatgtaggacgacatatttgctggagtgtgattgtgtttggtgtgtcgttgtaggttgtggggtatggagagtgagcaccctcttgaatatcgacgagatgatggtttgatcgaatcgacgtcttttcaataggggacatgggggccatgctagattccactgtgagctgacacttttccccgccaaagaccaagaccctcgatcgctttctcacgcgcgcgcgcgcaaacgagccactcgatcgcgctagtcgacactttgccccgctttccatccaatcacgtactcgcgattttgaaaacccatccatcgagagtcatacaaaacctcgctcggcatcgcactctcgtggtactattgccaggagctactcactagctcttcatgcatcatcgtgttcatcgtccctcaggtcatgcaggtcatcatcctcgttgcctctccaagggagatccctgatcgcggtcctcgccacccaatccaatccgaatcaagcgcgcgggttatatcctcgtcgttctattcgtcacggcaacaataacagaaatattcgtcatccatctcatctcatctcattccgatcactcgccgtcggtttcagtcgccacgtaaacacgcaaatagggtgtcctccagcccagtcattccccggtcttttgaatggcgaggcagtagccgggcaacaaatcgtatgacatatggtcagcagacccaaatgcaagatcgctcattagctggctcgtcggctagctcgcgacgacactactgaaggctgccgtcaattacgaccccgccggggaacccccttcaccttccccgcactccggctttatccgggtaatcgacccagccatctccatacccggtcccaagcgcatcgaggcgagtcgagcgacccgccgtcgtcagtaaagtacgggtacgaatacgtttcattgatacgatcccgcccagcccgttccatcctctcgagcacagcgatccacgctgatccgcgctcgttgataccgcactgacgagactatccacgaccgagtccttgaaactcttcagcacggacgctcaccttgtcttgtcttgtgtgagtgacggaaaacacgggactcgtgcccttccgaaacaccccgctcggactctagatccattcgatgatgtgcatctcaatggccgagattccagaggccgctcgtcgaaaagaatgaaatggcgcgatgggcgatagtcgtattatatatgtttgcctagtacaagtatgacatgccgaccgtgtcgtgtttcatcggtcatccatgaggggggaaggaagaaaaggttgaaagaaaaatcgaattataaagcaaaaaacaaagaaaaagggtgggcaggccgggcgtcgtcgcccctcgttcacaccgcctgaggctggccgaacccaccggcacctgcgctcccgtgcctgttgtaccctccctgtcccggtggaggcgggcctgggggcatcatcactcccatcggtccgtgcggttgagatccaggagggggagggggaggtggcgggaggctgatcccgagttgcgccatggacgctggcattcccggacaatccctgtgggacgataggacggccgagatcctcccgacctcgtcggtcaggttttgaatgatcgagcggagtcgctcgttttccccagacaggccgtcgaccttggtctgcagctgcgacaaccacgcctttttgcgttgtcgacatttgagagcagctgttgagcgtgatgaaaccgggatcagttgtgcggtacacgaaatctgaagcgacgacagacgacccccggactcaccctgcctgttcctctccaaaaagttcttgcgcttttcctcttcagtctcgggtttcctatctccccgcgcgctcctattgtcatcgtcgtcgtacccgttcatgtcacccatgtcgtcgtcgctgtcgccaaacgagttcatgaaatcaggcgagggcggttcgggtacgggcacattcttcttgctctttttggcggccggcttggccttggcaggtgccgcagcgtcgctcgtcttgcgcttgttgcccgcctttccgccctttttcccaccggcagcgttgacgacgggtttgggaggatcgacgtgctgctcctgctcctctcgcttgctcaattcttggtgcgcctgcgacaacaagaacaagccgttgacggcgccagaagcgtcggggccgggtggaccgggtggaggagggccgagagggtgaccgttggggtccgtcctcacataatccatcccgggacccggacgcatcccgccgggaccacctgcaccttgatgcagatgcgagggaggcagcgtcccgtgtgagcctgggtggccaggacccataccgggcggtccttgatgatggtgtccaccgtgcatgggtcccggatgtaattgatgcgggttgccggtcccgttgtggggtccgggaccgccttgctgcatctgctgctgctgctgatggtgttgttgaggaaaatacgagtcggcgtggtgcatgagcgtggcaccagggtgaacaggcatgtcgggaccgttcggtcgctgagcaggtggcggtggtggacccggtggaggtggaccgtggggaccgagggtgttgtggtacgacggcggttgatgtccgctataccttcgaccctcctcccgctgacgttcctcttgatccatctgattgatcacaccggtcaacgcgttcagcgtattgggcgtaatgtcgaccatggcgctggggttcggtccgcccgggagtggaccgccgtgcgtagttggtcgcgacaagaccgtctgcgagccatccccattgctcgacccttgtcccgaattgtcgtgcgtgttggtccccgaggacccgccgccattcgtggtcgaacctgcaccgctcgtctcgcccgcacctcctgctcctggggtattgttcgtgaccatgctcaagaacgccgccgtgttcgggctgggcagggggaacgagggcaggccgttgaccatcgagccgagtcccatcatcccaccgaatccgggcgtgaaaccggttccaccgccgggcgtaaacccggtcctgaatgtcgacggatcgtaccctcctgccccggcctgtggggtcatgcctgtcgacgccgaattgacgcccaacgccgaaggaccgtgggtcatggcgttgcttcccgctggacccgtcagcatggccggggacaaaggtcccgcgcgtaaagatgacgacaaccctgaccaagaaaagtgagggcctggttcgagaggtgcgggagaggtgagcgccgagactggcggcaaggccgttttggctggtggcggtgatgtcctcctcgtgcccgtcgccgtagtcccacctgtctccttttccctagcgagatcgcgtcgaaagtcttccgaactcgatcccgaggccgcggtgtgatggctgtgaatgctggtcgaactgcgggaaaagctctgttcgaacgggttgggctcgagttcgaatttggatttcgagatcgagctgatgggcggtcggatgggtggtcgcgagagcacggccgggaaggcttgtgggggtggaatgtctgtggccttgcccggagggtgtaaatgaccgttgctttccttttcgatcgatttgcgggctgtggccgtcgtcgtcgtcatggtaatatcgacgggcagagcgggaaccccgggtgaccagtcgatccagcatggaaggtccagttcggcgagggacgagttggatcgcatggagaatggtccatgaaagtggggcggagaggacgagcatgagcgggataatattgaaacatcgtcagcgggcggtcctacgcaaatcatcatctataggcgagaccaggaatgtcgactctctcgtcatctcgactcagttgtaagcgagaaagcgatgatggggagtaccggggggaaagacgaacagcgcgatcgaaaggtatatactcggtctaaccgacagacctgaggcttcctttcggaactctgcctcgttgactaccgtcttggcacggctctcctttgactttcgacgacgtcgcagtccagacgctcgacgactcgtttcaaggccatcatcgtgtcgcgctgtacgtgtcgccacacagtcttcgctacccactctcaagtaccacgacacgaggaacccagaaccatgcgctctttcactcacccagactaccctccctcgaccctctctcatccggtgccgtgacgcgtttcacgtccctcttttccgaacccgctcgactggcgctcttccccgtcttttcgtccgcaggactctccctcctgatctctggtggaggagctttccccattgacggctgaggcgtacctgatcctctcgacctggctctatccctcggatctatcgagccggttggctttttcacgacgggtgctgtggctttcgacgacgaccccgacgctgcggacgaggaagatgtcggttttgctggctttgctacgggcgataccgtacgtgttcgagcggacgatgtggtcgggttgacgttggtcgtgatcgcggtggtcgaggatgatggcattgatggtggtggtggggacggtggcgagacgggcggtttcggatccatcttgacgttgaccggcgaaccttgcttggatcccgacggggtcgaggtcgcggggataccctgttgtttcgtctctgggctgggcgacatgttgatcgtgttcaagtacgagccggtagactcgtcctcttgttcttgtcaaggtctaggtcgatgacactatcggtccaacgggattccctgccaactcgatctctgcgggaatgttgtctccttctcgtctctccgtacgtgatgccgagtctctctagatcgacttttcactttgccgcgtccaggagtgtacgtcgcttgataatccgactacttgatcattaaccgcccgcacgatccatcgccaggtcgaggtgagcgacagcgtagtagtagcggcgacgaagatgccaacagcagtggtgtcccgagtcgaacgacgatataaagtgtttgttgtgtcgatgttgatcagtgcgtcgacgaccgcggtcgaattgatcagacgcgacaatgcaacgcgtcggatgttcgagatcaaaccgtagttcgttcgagatgcgtcccgatgatgtcaagaccggtgcccgtcaagaaggagaaaggtgtgtgtgtcgaatgatgtgacacgttgagaacgagcaaggtgcggtcgtcgatagaggagcgagggatgatgaaccaggttggacaaagccggttgaacgcgaccgatcatggtcggccggggacagagacaacgagatccgatagtcaagcgtgggtggagaagggtcgtgacgccacgcatgagagtaaggatgaaaagagatagagtgattgcatcatggtcagaaatcgcactcatggaattacaagacgacgagaggaagcgacgaaaggtgatcgtagtgatgtcgaagaacgacgaggatgatggatatcggcagagagcgttgacaagactcacgatggcggcgatgtcgacgacgacctgatgatatatatccttctcctcgtccaattccgaagatgtatgcaaggtaccggttccgtgtgagagtgtgtcgatgatgcggttctgggaatgggccgtgacggctgtctgtttctgtgtgtgtgtgtgtgtgtgtttgtcgaatgaattatgacgacggatatgacgatgatgcgttgatgatgatgatgatgatgatgatgatgatgatggaggaatcggatcgagggggcgagagaagggggagagaagcggagatgtgtataagagacagccttcagatcatagccgaccagatcaagtcacatcaggttcaacagacgcaggggtacgtctaccacatcctctttgccccgagacggacttctctagggatgagcattttggaagagttgggagtaggtggggacgtcgaggtgaaagagctcggattggggtcgagctggatcgtgctagaggacgacctgctgagcttggaaaggggaccaggtgtgatccgggacctgtatctcgtacgtggccttgtcgtcttgtcgaatttcccttcgagacctcgagctcactgattgacttgcgctgtggctcggtatgaccgtgcgtgcgatagaacggggacgacacaccgttatacgatgcctccatggccttgatgacgtttcaaagggcgtacggattattcccccgattattgggaaagggcgatgccgctcaggtgcgtcagagtgccttccagtccggatctgtcacggtcctgtgctgatcgacccctcccgatattgaacatcaatagcgactcgtctcgctcttgaaacgacaccgggaatcacggccagatatctatgcatccctcgagccttctcagcaagtcgacggcttgatcgtcatcgatcggagcaccgactggatcaccccaatgatgaccatgttgacgtacgaaggattgctcgccgagtacgtcgggatacagcattgtaggtcatcgacgccgttctgcaggatgagccacgtcctcggtgctgactggaaggaatttatgacggtgatcagcacatatcgaggtggatccggagctgttgtcaaccgaacccaatcgaacggccgcaacaccggggtcttccgagcccatctcatctacgatgggcgcccctggatcgagctcgcggcctaccaagaaacgcaaacacctgctcagtgggtcgtcggacccattgttcgccgaactgagggactcgaacttctccattgtcggcgccaagctggctcgattggctcgacgtctcgaagcggattatcagggcaagaacagcttggataccgttggcaagatgaaagagtttgtaggcaagctgggcggattacagggcgagcaacgggcactcaaattgcgtacgtcgtgaccgggtcaaagtcgctatttccgcgtgacccgtagagactaaatcaggatctcgcgctacaaagatacgagcttgacggagattttgatgcccatcacgaattcgcccggattcggaagactgctagagatccaacagagtgagccttggtcatgtctccgcacctgcgacatgccgagccaaacatccgcacgattgcagacatcattaccggtttcgaacctacaaatcaaatgacggcgatagaggatctgctcatccagcagtcacacacaccgtgggacatactgcgactgataatcctactttctctgtcaatcgggggcatcagacaaaaggtcttggatagtttcaaacgagaattcttgcaaatctacggttatcaccacttgacgacatttatcaacctggagcggctcggattgctgaatcattcaccagcaccaggcggcaccaccttctcgcagacccggaaatcgcttcgtctatgggtcgaagaggcagacgagcaggatcccaacgatatcgcttatacctactcgggatacgcgcctttgagcgtacgcctcgttcaatgcgtcagcatgaagcccgccgtcatggccaccgcgattacaggtctcaatgccgatcgcaatgggagaacaaggcaaaccagtgaagctgacggcgatacgaatcgcacggtcccccgtgctcacggtctaatgggctggaaaggtttcgaggaaacgctagatttgcttccgggaccgactatcgacgattctcagcggtcctcgcaagcaatagcacagcgttcaggtaggttcatgccttggcaagtaaagcccgcagtccgacggatcgattgaccagcagcgttcagatcgcgatgcgacgatgaaaacgaccgtggtctttttcctaggtggttgcacgcatactgagatatcagcgctcagatggatgagcaagcaggctcaaggtcagtgcagaaacttcggtcaaagattcctccgcgtcacaatctgattcgagcacaagtcacaggccggaaatacgtgatcgccaccagcagcattctagacggcgcttcagtgagtcctggtgagaagctggcggtcagccatatacagctgaaagtggaaattacccggtatcacagatgctcaaggagctcggagtgccggagttgccagaacgcaagcctctagcgtaaccgtatagaaccactgtattcggtgatataaatccagatcgcgatcgcggtactgtattacagaaagattctagattattcctacacccggacatactatacaattcggtagcaatcgtttcaatgtgctcgtcgtcgccatgctgagaaggaggctctaggcgtactgggccgtgagatgtcgtgtagatataacagagaaaatgaaggtgtgtcgatgagatcaggtgggtttcggacgaccgatcggacgctattgacgggaggatttgcgtcgtgcgtttttgagcgagttgaaccatccacctcgttcccattgaccgcggacataggcatcctcgactctatgttcggcgatagagatgccgctcagaaggcgcaacatccgtttaaagtcgatcggcttgaggatccagccgtcaaagtctttggcaagtttggatcggtctgcttccagaagcgtcgctgataccgcgaggatggggatccgcccgtctactcgcttgagagtaggggagatgctgtctaccgagggctcacacttgcgaatcgttgcggccgattctcgaccatccatgacgggcatcctgtttaacgtgcattttcaatatgagcgggatgcgaatacaagctgtgggaccgcacgacttactggatatccatgaggatgcaatcgaaattgggatcctcgcgaattcgatcgaccgcttcttggccattggtgtcggagatcacctcatggccgtccatcttcagtcgtctttcaaggatcttacgattgacgtcgtcgtcctgtggtatataatgggggtgacagtatgcttagtcgtcaaggccatccataaaacgggcccttcagcaatctcacttcaacaatcaagatccgcagtttccctcctatcggtttcgctcgcttcttctttggcttgctgtcgtcggtagctctcgtctccagcgtatcatccgtttgagccgtttccgacggggagtgaggtcccgacgatatcgatggatcgccagctgaagtggtgattctcaagggcggggatcgcgaggggtgatgggcaaaggctgattggctacgtgaataattgggtcgaaccatttccttgctcgactgcttgtcatcattggttttcgctggcttgattggccaagaactgtctgcaacggggaatgtccctggttgagccattctggcctctgccgaccggatcctctcgtcgtcggggccagccctggccatgtgagattgcgaaaaggcgtcgacgaatccgtcaagttcccgagtaccagttgaccgagcggaagagatcgccgatccagatccagaacccacactacctgaccgagctggaggattcacaagggaattatccgaagcagttgccgttccttcgtggcgcgccatcgtaacgttgaagtaaaacttcgagccttttccgacttcagaatcggcgcgcagcgttcctcctacttgttcaattatccttgcgacaacggccagtccgagaccttgaagtcaagagacggacgtcagccggtcaagcagtgatgacagaatcgcgtacacaaacttaccaagtccagtaacggattggtcctctcccgaatcggcttgttcaagcgtgacgaacatcgcctgcaacttgtccgaggggatcccacagcctgtgtccgctacgatgatctcagtttggacgaaaccggaatctgcgctcggtgcgctttcctcatcagaactcttcgctcgacacgacactgagacggagcccgtctctgtgtatttgactacgaatcacaatgatgtttaactgggaggtccctggtaaattacgtgactttcgacgcggatagaaactgaccagcattcgcaatcaaattggccacaacagtccgtatcttcttttgatcgccgagcaagaacgagtctggagcagcgtgcaggtcgatattgtactcgagaccccggcgtttggcttccgaagcatacatgcgcgaggcgtctttgatgcattgacgaatgtcgaaagggtcgttgaaagccgtttcgttaccactctcgatacgagtcaagtcctgcagagagatctcagatcagcttcgagacgtcttttcagttgacatgcgaaacgtaccaaaaggtcattgatagtgaatagcaagctctgcggatgatcgaggtgcaagacggtcagtccatcgcaagcgacatcacaagttgatgatgaccgacctttgatgccgtgtgagacctggtcaaattctctcgtgtctcgccatcgagctgtccgtccaaagccagttcgagatagctgcggcgagagaagcgtagataagcgggcgcagttattgcgcaaagccaagccaaagactgacttgatgatttgattaagcggcgttcgaactgtctcagatacagtaaggttgtgagatcagttatgagttcggcaataatctatcggaatcaagtattgcgactcgccttcatgggtggcgttgctcaacaggagggaagtcatctggtttgccttcaaggcggactccttttgacgccagacctcgataaactttccgtaaacaagcgcaagcacaccagccgtttcaagctgctcgtccgtccaattcttcgatttgccggcgatcgtctccgaccagaccttgaaagattgacggggttccaaattcgcacccttttccttcccgtccttgtaaggcttccctgcccagtggacttgacgcgactggcccttgcggaggaacgctatgaaatcttggccaccggtagacaacggcacgtagagcagtccgctaatgatctgcagattcctcgacgatacgaggtctgggaaatcttcaccaatgtgcgacgagatttgcatttggctatcgatgagaacaggatcagagagctgctgcgatcaaatcaaacgtttgtcacctacttgaacttcttgtatcgcagatattcagcaatcaagaggatctcttgaccgtgctccgtgctcgatcccaagatcttggccccttcgccgatgaccaggacaccgcaatcggcctataaatatcattggttgagcccgaattcttcatcggggcgagctaatgatcttacgtcaaagagtgccagaaggtcattggcattggatacgatgtaaccagtaggatgagcatcggtagggatggtactgatctatatcaggagttcgccagagccaagcccacgacgtggtttagtccggctatcaggtgtaattgtatgctacgtgcgacaacgcaccaattttcgagtatgcagcctagcagcgtaactcagtcgttcgatattacgcgagactgaatcgctcaggagcctgagcatttgacggacagggaagctgactcgcaatccgtggttaccatagccatggcaagcgatcagaccccacaggcttccgaatgccatgatggactagatgaagagatagacatcacaggtttgtcaatttggagcaacaatgccgagtcgcaacgatactcacaatcgacatgctcgaccggacgcccatgttcttcaagtagacctgcggcaagggaaatcgattggttcctcttcagtttgctcttcccaagaccttcagaacctcggaaactaaccatatggatgggactcatggcccgaagataacaatgggtcatatccaccgggttgtcgagatctcgttgacttcgaaggaccattcgtgccgtggtatgggtacgatcgtaaagcagtcggaccttgttgatcctgtacagctctcgagcttgagcagggatgtcggtggcggggaactgcaaacctttgtaaagatcgtgggttttgctccaatccactaattctgcaacgaccagcccgttccaagccgagtcgaagctgtagaccagacaacgatggaattgtgtcaggtccttaatgactccgacaacgatcttgaggaaggagtcaaggtctggggcctgactcagttgatcgttgatctgtgccagaacagcgaaaacatccatagtgcccacgcccccggagccggtgccacggcggtttggcctaggccgtgcgcctttgccctgactcgactgactcccgtcctcgattgtctgcgtttgattcctggtcatacgacgcagcctctctaatgccctaagcggtttcgcgtgacttgttgtgctctccaggatgtcctcagccttgacatccatttcatcgccgtcgagtcccataacttcttcttcttgattgcgaacctgaagggtagaatctgataaacctgaatcctgagaattggtgcgaggcgtcatcacgaccgatgggcggagatttctcgagctcttttcgctacccccatcgcggcctttgacggtatcggcggatggggcggtgttcattgaggtcccagaacctgtagttgtcgacgtattggagccggtcgtaggcgaggatacgccggaagcaacattccgcgtcacaggggggtataggggattttgaaagtccttctcaagctcaaactcgagaatgatcaggtttctcggctcagcctcctggttggctgcaccagtaccgcgcttcttcgcagccgtctgagccggacggtgggcagctacccaacaagtccactccttgcgccgactatccgtcactgacgatccattggaaaggttgtccgatacgtcgcgatcgcccgttccgggttcgccgaagccactcagtaggaaaacatgcggtccctcgtcggtcaacgtgtcctcgtccatgtcgggatcgggcagataatcgatattgtctctcagtacgtgttcttgatgccgtgacaaattccgggtgaagcaagaaactttgaacaagtacttcggcgacaatccgagtatatcggtcgagttctgatcggagaccgagccgcgacgaattagaagccgctcaaacgccaaatattactcgtactttgatcgtgcaaacttacctcggaaacctgccgtacaaccagttcgtccgtttcgaagttctcctccagcaccatgagcacaccgaatgattgaacagagccaggagtagtaattggctacacagcattgaggttaagcgactataatttcgctcgaaccgatactcaaaagctgctcacctcatcctcgcacttcttcagctgaccctctctgccagtaacgacgtgatggccatcgtcggtcgtaacgtgctcaaatcgaaccgtcataagcggttcttcgcccggacggctgacctctgaagctgaccggtccagagacgattgagccgcagcagattcggcatccatcatcatgtcatcctcatcttcctcgacagctgagttacgagctgagtctcgagccgattctcgaccacacgctgcttcgtcgccaggtccaggactaggcgtgggggcgttaggatcgcttaaattcgtcgtttcagcctggcggttcacgaaattctgaacgctcgagtgataatcaggcatactgttgacctgagctttgttctgcttctttcctccccgcatagcagaatgcagagcatccttactgccccttagcgaactggtgcgagtaccgtaagaggactcggtattgccttcttcgccagcgcgaccgggaagcaaagtgataccagactcgaacggccgcatgtcagagtcgtgagatgccgtggtactgctcggccgcgtgtttcgaggagatcctgtctgcggctgcgtagaagatggacgagtgacaccagcgaggccatcttcctcttgtttcttgtcctcggtcggactctcgtcttggtcgatgacttcgcttctcccgctatcgctacgagtaccgggaccgacatcgggttccttgttctcgtgctgtcggcggatcggatggatcgtatcggttctacttccagaaccggcggaatcttcgctcatgcgttccccgttgtcacccagaccattcgactggaagttgtcccctaacatgactggacgtggcccgtgatcatcatcgtccaaattgtccgagtcatccgcctcattggcttcatctgagtcgtagtcttctggcatgggcctgttgctcgcgttgcgagaattccgtatccgtttgccgtcagaagggcccgagatattgatcttttcattctttcgaggatgatgagagaagctgtacgttttcccgtcctccgagtcgttcgatttgttcgaccgctcggtggtttggccaggagacggtgcatctttcggtgcaggatcgatctgaccataggcgtgacctcgacctctcgagtcgcgactgtcacgactgcttgtccggtgcatctgagactgacagcgatcaccagaactacctccttgagtattcggcacgggcaagttggaggtcgatcgagatgtgggagatgaagaattgccagataacatatctgttccgtcacttttgcgtcgctcctcgttcagcaaggcatcgatgaagtatgtgctctgcgctgtctccgcaacagtaggcagaggtgccgagtagaatccactaccgacaacaccgggcggccgatagccattggaagggcccgcttccgaattctcattggagaggtgagcccatggcagatgcttgtggatttcggccaggtcgtatgtatgaccttcgagcatgttttgtatggactctccttgggcaaggatgctcgagatggacgatcccgccgtgcctgcgggtaacgaaggcgatcgatccctgccggtcgggtcattgggatcttgtggtcggggaaggccgccgtcgtttgacggtgcctggtattgtgtctgctgctgagcgttgtgcacaggttcgtttctgacttttcgaccgttttgaggctgattgcgattggcgaaaacggatcggacggggaacacgaaggacgtgctcgacgatccagacggcgacgtcggtccagaaaaccctatcgtctcctcgttctgattgacgccgaaaggtggctcccgtccaagattcagttgagatgacgatctgccatcgggacctctcgatttcggcgataccggggactcggattgctttgaaggacggccgttgttggtagggtgtgcgagcggcgtggctaaacctgaaccaccttcatgatcggcatcgccaaaatccacgatgttgacgtccttcggcggctgagccattttgataccacaggtagctcgacaggcttcgcagcgagagttgaactaacacgtgccaccgatgtgacctctgctcaactagaggtaagatcccttattaggcagttccccgggcgatcgcccgatctccgtgggcaagtgctgacagaaagtcggaacgtcgtgccgatagtcgtagtcgccgaatccgcgatcgggatggtagagctctcctatacgaatgcaagcagaccgctcactgttggcgaatggtctttacggataggcggtaccgggggtcgagtaaattgcccgttccgctttgagtggcgccttgccgcacgaagtttgttgagatttctcgatccaatcactctatgtgtgtcggccaacgcagctatctttgctgacaagtggtgccgatagccgagattgaacaggataagatgattgctgtctcggtcgtggcagatctacctggcagatggttacttcgatgattgtcgacccaaggcgttggtggtgacaccctgtacgaaacgatgatgcacacagagtcaggggtgtgaaagtcaggggcgaagagacagagagaggggaaggcgagtagtgtgtgtgtgtgtgtgtgtgtgtgtgtgcggtcagtggatgagagtaagcgatggggggaaagggcggaaggctgctttgagcgggcttacggagagacagagagtgcggcggcgagcaagaggtgggtgagggtgaaagagacagcgaaagagcgaaagagggcgaaggcgggcagacgagaggcaaaacaggcgcggaggcggatctagatcactttgcctgcgatccaatcgaaaccttacgagaaagggaagagcaacgacgaattgacaggcaacagccatcacagcaggccagattgcaaactagaagtttgccaaacagtatcaaaccattctaccaagtcttctacatgctcccttgacctgaatcccgtagaatcgacgaccgcaaggaggaagaggcgaaccaaccagccaccttgcagatcccgatcgcaattctgcgcatcgaccccaccctcgtgaacatatcagctttgcgggactcttagccatgcgcatctacgcgctgacgacctagttctctttgttatatgtatgtaccggcgcccttgcgtctgattacttgtttctgtgcgtgcatgtttgtagccgcgtcgtcgaatacaggccatccggtaccggctgtttacgcgatccaccgtattcactggaatatcaggaatcccccgatcgtcagcctcttggcctgaagatcggccattctctggcgcgagctgcgggcgacaggcgagcctcgccacgccacgcgacacttccggtcactaggcgatcagaaagggcgcggttcggctaccggcgacagtaagatcaaaggaatcacaatttcgttaatcatgcccgaggtgcaacgaccgagccgctagccgccgcctagcgaagatcatgcatacgtactcgcgaggtttatgatgacgattgaaacgctttagatgcgaccgatagtcaagtcgttctaaggaaaacccaagctagatttataccagaagttgcaaacccgccgacaggggaacaggcagcaagctggcacacatgtaaatagaaaaggtacgagaaggatctgatggaaaggaaaaggtggaggttgattatggtcccgctgccaagtagcgtgcgcgctctctgcccgcaagcgactgggcagggtagaggcacaaacagagagagagagagaccgttcgccaaatccttgcgctaatttcgaaaggaaatgaaaaccatgaaaagccggccaaggcaggagaaggaagccgttccgccgttcccctcgtcgatcaacgcctttcgagctcgcggatcgaggtttcatgatttcgcttccggcaaggtgacaacttcgacctgaccattttacaagcttctataacgcgcagccgaagggcgagcatcgaggcccctaaaagagaagtcctctttccctcgacgtgatagactgctcctggaatgttccgtgagcggtagcgtcgatgaagaggtgcgaccagctggatcaagcgaggccttttgcccttggacaacattcggctcgtctagctgtcgcttgtcaagtattggtccatccacgccgtcaaactggaattggtcgcttcccgatcttaacgcactggaagtactcccccatacatctcttctcggtcctggtccatcgacatccgtaaagctggtcgaagtccagctacctcggaccgagttccaagagacgatagaatcaaaccgaccggatgaacctcgatcccttgtaccgatcaaaggtgcgttgacaagggacgtggaggaattgcgagaccaagatccgcctagtctttgtctaatgaggaagtcccttgaagcgtttcgtttcggcggagatgatcccatccgtccggggtcgtgtcccatagcgaaaggatcgaaccattgaatactgccgccagtccctctgcagtttgacgggccgccgttctgctcggtcaaggcgatgttgaggccgtacatcccgataccgtagccccgtgtgcttgaatcaagagggcttagagggtcactgcaggctaggctagtgagttcctcgtcctcaaaattcggtggaagaagatgctcgtcctgttcgggtacctcacacagctcggacaagctgtcgtcgggatttcccttgcattgcaacagcgctcttgtggcatgatacggatcaaagtattgagcccgataggattcggatgccctctcggtctttgcgtatgactgcagccgctcctcagcgatgtcactaggaagaaggagcaaggcgaagcacaggtgaccctaggttgagccctttcgcattgtacatttcaattacacccacgcggcaatgagacttacctttgtccgccagaaccactcgaggtttcatattctgtcttgagccggagggagctttccagctcggaatcgttcaactgaacaacacgctcgtatatcaccatctcactatagcttggcaaggactttgatctcttggacttaagcacaggacggatggagctccccagccggtcagtggcgtcactatggagagccggttgcgaggaagtgctggccttgggtgccacggtagacattgcaagaccccttaaggtttgaaccattgtgatgactgaatctttgctaatgttcagctttcctagtcgggggggttggagtttcgtcctgtatgagctcagtcaggagatatctcgccgatcctgcttaaatgcgctgcgaaagagatagattgcaaggtgatagatcgatgaacgaagtcgtgttcggtgctcgtcggtcgccgtaatacacgatgaacagagtcataagtccacattgtgattcgggatgacccccctgggccgttctgagattctgaaaatgggcgagcccgctctgggaacatctggctgatctgtaattatcattgcatcgctgctagcgatcatggatgaatccgatcgcgccgagcgattcacttccatgtcaatttgcgacgtcacggaatcaaccgaaatttcatccgtgtcacgctttccgaagcaacgtcatgcgacttccacccgtggcccttgatcaaacaccgagaagcgagattagttttgaccctctactcaatcgaggagaagcagcagagcgggattaaagtgtgtccgcctggctcaaagccgttgcttttccgttgctacagcacttaggcagacactcgagtcacgtgatattcacacattgtctacgcttgatgaaacgcccgataacgccttccggttctgcgctgtagcctataatcactcgatcagtcggctttgatcgcttagtgtctgtcctcatggctcaatgccaggaagatgccgtaagagcgtcacaagagccaatatcagacgtctcgattgaaagcatttttggcacttaggacattgcaacatccaagaatattgtgccgtgataccgggcgagctttgtatgacaatccattatcactatcggatagtcgatccgctcaagtcattctttacctcatataacatggaaaaaaagagggggagaagaaaaggggtatcctgcaagaaagagctcttaatgtatgactggatgaaccgtcgcggcagggatcgcagccctcttcgtctctttcttccacgattcggcagactagcgggcacgggaagccgctggttgatcctcagtatatggtccatataagcttataagctataaggattcccccctgattcacacgcacacctcgagttgcaacgtctcttctcatgcttctgcataacacaatgaagaccaccctccatcccgaaaatcagaatccagagggtcttctcgtcgcgacgccggcgaatcagatgcccgcttcattgcccatcacgcacgtccaacaagaagtagtacttggtgtaccgtgtgccagtgatacccggaactgagcgcaacgaggtaacctgcacagcttcataagagcccgaaagcatgccttcgggatccagcctgacctggatgactgcttttgtttccgcgagacagaggtgccacttcggcaatgctcaattcgattgaatagctttcagcagacgaccccgtcctgagaaaaactgtaacgcctacgattttcatgaggcaagagattgaaccgcgcagaacatcaacgacatccgcacgttcaggcgcagtacgagtaccattggtcgaaatgtagccctgcaataatgataatggaagcttggaaagtgcgctaaccacatccttggcgctcccaacagtacagaataggcgaccgtcctttctcttcgcgtcagcttgggttgaaatgattgaaacgagcaaagcccttgactcgttggcttctggaggaaaggaacagacattattgcttggaaaattcagttcacgcttggttgtccccaccgtgaggaagcgcagtgtcacatctcgaaacgaaccacgggaggctaggttacaacaagcacgaatttgcgaagcggtaagtgggccgatagaaggtcttgcttgacgggactgtccagtggaccactgcatgtgacaggaattgacgagggcaaataggacacaagcgtgtcattacggataactcaagtggaaattgttcaggctgaacaagggcaatataaaattgttttggctagggcttgttcttggctttgatgttattgacgatgagcgactagtcgaatacattgaaaggtcattagcgcatctcgataatctcgcataagattgtagcttactttgtagctttcaacatcaccagagaactttgaaacttcacctccggcgcagacccaaagctggttagacgtatgcgtgatgaatcgctcgtcgtgactggaaatttgcagcaattcagaaacacgacaagcacgatcaggcagaagctaaacggacctgatgctaatgactcctcctttgtacaccttgagtgcctcgatcagggcatcgataccttcgatatccaagtggttggaaggctgataataaccaaattcagctatgcctgatcgacaggaactgacgcagtagtttagcgtgacgtacctcgtccaggagcaacacatgcggcctctgcatcgacaagacagcgaacgcgaccctactcttctgtcctccagacaacgtcccaatcttttgcaatccagttagaccagtgatgccgaaagcgcctagatgcgaacggtattcctgttccgtctgacccgggaatttggtttgcaagaatccaacggatgattgatcgacgtcgagggaatcgatatgctaaatggagcgaaggcatcggaatttcagtcaagcagaccggctgatgatgtcagttctaggattgactcacatgctgagtgaagtatgctacccttagtctaccgttcctcgtaacgtgaccgccttgaggctcaaggttacctgtcaacagcttgatgctgcgaaatggaagccagcctggtcaggaaccagttacaacaacagtcgttgaatgacctcactcacagtgtcgattttccggctccgttgggaccgatcacggcgattcggctatctagtccaacgtcgatgttgacagtgtgcagaatttctttgccagcagtgtaagcaaagctgacttcattcaactgaagtagcggcggcgagattttctctgggtcagggaacctaataagcgacatatgcgatcagcaagacacgtgggccatcacaaacggcgaacagaacttgcttgaaagtctcgctgtcttccgcctcgggcggctcgagttctggcaacttctccaagatcttgattttagactgtgcttgcgcagctcggttggcattgtacctccatcgatcgatgaacgcctgcgcagaagctctcgaaaatcagatcgctctgtggttgagtgattcgggcgggtcttggcagcttacttgcagatgctgtctatattgcagctgcgactcgtactccttcttgagattcttcgcacgttcggtcttcgtggcataaaattggctaaagtttcctttgtagtagtccaaccgttgactgtgctgatggataatgtcttgagcgacattgtccaagaaggctcggtcgtgggatctacatgtttgttgggtaagagcttgtacttccgggtcatgcagggctacttacacgacgagcagggttccaggccaagtctgcaaataatcttccaaccaggcaatagcgttcagatctgtagtcacacggtaagcaagcagcttcctgagcgacatgggttcttctctcacccaacatgttggaaggctcgtcaagcattagcaactgaaagtgtcctggtcagctaacaaacgataaaaaatgacggtacggcgatcattaactcacgtccggttgaacaaacaaggctcgagccaaagccaaacgcatcctgtcacgaacacgactgatcagctcgaccggctcgcacgtacattccgccgaggtggaaacgcacctccatcctcccgagaacgacttcgtagtcttcttctgatcttcgtcatcgaagcccagaccagcgagcagactggaagctcgcgcaggaccggtctcagcttccatatcaagcaagttcttctggatttcgcccagtcttgcggccagttcgtccttctcggcgttcatgcgcacaacctcggcttcgccgtcctgaacggtcttctgctccagttgctcgagcttagcattgatctccatttcttccgtcatcagcttgtgtcgccacacatcggcccggagaacggactccaatgcggtcgtctcgtctccgacgatctaagggcagagagattgtattggtcagaaaatacgacgtagacttgcgagcgttcgacgaatgcaacacatacttcttgttcgacataactggaattcgaaagaaacgatgtcagcacgtcttccacaggaaccgacacagctcatcgtacagtacagagatatggctgggaatcggtacctctcggagagcaagattccgaagaagggtagactttccaataccgttccttccaataagactataatgggatgaaactgaacatttgcgcaaagcattttcgtacctgagtatgtcgactcacccgtatcgccttccatgagccatagtaagatcggctccagacctattgtagagtcggctcagactttgaagccgacaccacgctcggtgtaagccgcactcacaaaatcctgttgctgccgaaagacacgtcgatgttggtcaagtgaatgtccttgctcttgcccttgttcgcgcctcccaactggagcgggttgaccttcataaacatctcttcgtaactctgttgcttcttagccatctcgaccagctttgacccttcgtacaaatcgcgacgagatcgcttctcaatcttggcctggtccccataaagcggtcacataagcaaaacgtccccactgaaactagatgcatcaatctaaccttgatcttggcttcggctttggccagcttggctacatcgacccgagaagcctgtgtgtcttttaatgtcagctaccagagcgacatgtacctgcctttgcttcgatacacacctgactcttcccgccatgttcaaggtcgacttgcccggataaagcgatcgtggtgctcatgccactcgtcttcatatcgatcgccttctctagtcggtgaacggtagggcgagccttctgcctgccggaggacgacgtctcgaggtaggccgtcagacggccgatgaaggattcgagagcttcctcggacaccttcgcatcccaaagcattcccttgatcatttctacgatttcttccatctcttcgtcctcatcttggacaagaccggtaatgtatgccgtaacgaccgggtcaacatagtcgaaattggatcgctgtgtgagacgcaagagaggcaattgtaagcatatactcggccttgactgatgcggcacgacccacaatgtccgctgcaatctccgccattgtaactctgttgaatttgatctaagaacgcgctactacaaggggtacatgagagcgagcaaggcatgcaagacgtcgcctataagtaatggttcagacgtccgatgtatttgacgtcggcggcgacgatataccaacatctagattggttccccaggtaggttctaggcgcgtcgccctcgggtctgaggcgggccatgcgcagagatagtggaagagtgttaaccaagataccgtacgccatcttgtttcacctaattattactacttgctagttcagcaaagagaacagtcgcaccctcatggcagaaaaggtaggcggcaaggatagaatggtcgatatgcagtagtgagacgttttattacaggggataatgccaagaaggttcgtaaagcccgttacgcaatccaatttcaggacggccaggttcgtgaaagcaacatgcgctcgttctgccggcggtatgcttaggccagttggtgtctgtgtcaacaaagagatgttagaagctatcgcgactagatccaatgtcaggacatacgaattgctcgacatgaatgacatcagagcctgaacgctagactcgggcagaggtttcatcagctcttgtacctagaagtagaagcaggacctttggtcaacggcactgcgatgcttcaagtgatcgccgggaaagtcttaccttgccaggatgacgtctactggtctcggcgaggcgagagctcaagtaaacctttgcgtctggtacctgcgcaagagggtcgcgcgaagcaggctcggaagcccccagcttggagaaactggcctggaagctagattcctcgggatccagctgatcgaggttgtcctcttccgtgttgagatcctgaacgagcaagaagaggtccagagcagcttcgaggaccatcggccaggcggagattagcgaaggttgaagcaagacatcaccctcggtcaaaagatcggttaggccaacaacgacgacttttcggtccttcgcagcggtctttcgagtctcaggcaggataacgccctcgaggaggccgacgatcaagctaagattcgacatgtaagaaacagcaacgcattcgagacccttccatccggattactcacctcggttgtatggcttcgagttgctcgacgacaacggcgggcccgacgccaggcaaagcacataacaagaggatgaagactgacactgcctgtctgaaagctggagtcccactagaccgcatcctgttcaggatgagcataaaaacggtcttggtgaagggcgccatgatcgacctagtgattatacgaagggctaggtcaattggcgactcgtcacggtaaaccggtccgccacggggcttacatcggtatcgactcataaatgactccgaccaactccacgccagcgacatcagtggccttcagggtgactagcttctggaagatacctagcagagcttgcacgtggcctctctgcgcgattgttggtcctcctcggatgagaagtgccttccagagccgaaccaaggcaggaacattgcctcgtgattcccacaaagaagcgtgcaaaagtggtgcaagtaaattctcataggccgctgggagcacgttcgtgggatgcagctcgagtaattgcgagcaaatttggaacgcgtaagggatgaattctggttgagatccaattgcagtcatctcagtcgtctctatttgggcttcagcgagagcgcagataaaactcaccgaccacatcattggcaagcatagcctgaatcggtacgaacagtgcctgttcgaatggcccaagagcatcaggttggccagcacacacatagctgtggcacataaaagagggggagaagcgatgagctttactgcgccgcagaaaatcgacataaggtaacacaccgagtcagagcagaaatcgactcgaagttgtattggttgaactttgggttgcttggattcttgctcgtctccccgatgatagcgaccaaacgctctagaatcgcttgataggagggaacaaggctctgccgggccgtgatgataactcgcatcacacctgttgacggaacattcagcttatcaattctcgaaaccatgcgcagaggccagtagcacatacacttcatgagatgatcattctcagcaatcttttgaggcgtgtcgccacgctgaatctgcgtgaaacacgccatcaaaatactttcggcaaacggccgtacgtccgcttggttgaagctgaagtttcacgcaagacggcgataagtcaaggagctgacgcctatacgagtgataaacaactcacagcatcatcccgttctgcttgatgaaaagcaccctctcaatcgtgatcgcggcaaaagagtaaatgacgtaattatccgctttgagatgttggacgagtaaagggaggacagatagcaactgctctttcgtaagctataacgtgagaagtatcaaatgggtcaatcaacccggcttttacagcgttaccagggcaactaacttggttcctgaaggtatagaggtatttgattgcgtcaacctgaaggatcgggtgcactgccgatgattctgcctgcaagtctgcgaagacattctgcgagaaccagtcaaccacatcgatcagagtattgactgttgttactccttgcttttaacgattacatggccgttagcagcgtagtaaggtctgtaggcaatgtacggaactcacgtgttgagtggatccccggctggcaatagaggtgagcaggtatatagccgtgtccttcgctttccactccacagcgggattggaagcgtagatctgattaggtcgggcacgcgacactgttagagatcaatcacgaaacggtatcggcctcttgccatacctgtaggaagcgttcgatgtgaccgccgacaatgttcgtgatctgctgctcaaacagttgcatgagggcccgagtaaattcagtggctgcggcgcggcgagtgtcgtgctctatacggtgcggcatcaacatgcattacgaagtctcgctcgatatagccattgcagtctcacccgtcgacgcttccagatcctggcggatgaactccataggatcgtcctcgaacatctcctcttcatgagctacggtagcccgtagagaatattgtaatcagcgcctggactaatcttactcgaatgccacttacatcggattgtcatgttaggcaggatgatcaatcgacagaagtcttcgagtgtctgttgagcctcgaagagctgcctgtgactacccatcttgaccacaacggagaggaatcccaaagctttgacaacgaactgcagacaggcgaccgtacgacaatcagcaacctgagaggtctcagtgaggtccatgcaactattcacctgatcgtccctggtgcccattcccacggaacccaatatcctccagacgccttcaacgaagaggccaagttgagggaaggattcgctgtacttcaatgcgtaaagctcggcgatctcgcagatggacgcgcgaatggcctgtacgggcccgccagcctcgtcatcttcctacgtttcgctcatctttgggtcagcagtctagtcctctcagcttcgaagtctcgcttgacttacgtcacccatgatttcgggcacttcccagcgtaaatacttccctagaagaccataggctgctggcgaaccggtcgcaacttggtcaaagtcccccatgaacagggtgttgttgtcttcaaagtattcgggaaagtcctggcagttcaagtcatggtacagctcgataaggaggtgcaacgattgagccagttccaggatcgtggtcgagtcaggcagaggtgtagctggataacctgagagcagctgatccacgcgcttcatttgaggattgtgattggcccttcagcctaagttcgttgcatttcagcgcacgtccgccttacctgaaacagctccgtatagggtttgcagaatttttccaggacggtcttgattgtcgagaagagttcattcgattgaaattgcgatcgccatcttccgaacgaaatggtcaggcagatgttcggctgcgctttagaagtagaaaagtataccttttgaagattgagtgcgccgttgtcaagactccgttgttgacggtgaagttgtcgccagaaaagctggcgaccatgtcctgcaccgtatccgatagtgagaagattgcaacgacggtcgtcctcggaaggaactcacatcgatcagattgggccatctctctgggaaatcgagttcagcaatctcggcgactgcttctccgatttgcgactgtagccgcgatgcaccagtggtggacagggataccatgataggcacgagctgcgatttgaccgtcatcttgtcaaaggacgataggtcgttatcctaccattatcgacgaatgcaagagattcatctgtcagtaagtcctgaaagtcaatcttctctacgagcaggattatcaagcccacctctgtccaacgtttcttcacaacgttcttgaagtagacgccggccgcttgtcggacatgcataggggcagcatccgacctgacgaggttgagaaccagcaacaaaaatccttcagtggtctcactgctgtcgagtgttttctctgctgggtggcggacctctggttgcggcgagagtgattgcgtgagaaggtcggacagcatactcaggtgctgctgattatcctgcatcttgacactcttgctgatctgggtaatgtggcggatatactgcttttaaagttgcgtctaagatcccttccttgggaatagcaagatccctctatttgaacctggtctcgtattatcggattgactacgacgtatagtagtacgttacactacactactgaacaccaacatttgctaagtacttgctagcgtactagcgttcggctaggccaccgatcgttgttatggattcgcggcacttggttgagcggatacaaaaaggagaaagacggacatcatcgatgtccgcgcgactctggcgaaatagatcttacttgaaccatatgtctcatgtctcaaaggaccaagggacgctcttgctgttgcgttcgattcgattcgatacacgatacatgtcatagccgacctaaattcaagccgcgttttgattcacatctcaacaacaactgtgcacagcttgcaagaaccctgcgcttcgggatcgcagcagttcggtatagggctttgagctgcgcctcaaagtgaattaaggaagtctcaggggcttcacgtgtctccttacgcttcgtaatttcggaactccgataaacatcacatgtggtcagtccgtggtcattcgatcgtcgtcactgccagtcaaaatctcttgcaatcgaatcattttgcagcatcaacgtgattgtttgcgatcgagaccgagtggtgaagtggtagatcagtgtatgcgccatcgcaataacgcgaatttggcggagtaccagaagtatatagtgctctagcgctgcagcgcttgagtcagtcgatcaaatgctcttgctcatccgcatacgactcaagcaccgatcggatgactgcgatgttctacttttgccgagtctcgtccaaaaccgtctgattaccgctctgacgtcagaactgatcagcgctcgagtccggggtggccttgcagatgctgctctatggccattggagcagattgaggctcctacggaagctaccacaatgggtaagctggagcgattggattgcagagacctcgacccgtatttctcaaatcaaggttccactacacaattacacatcgtcctccttgtacgtgtgtacagcaatacggaatgagtacgcagaaatcatgtccgagacacgtgttgcaaggcgtccagtcctcattgcgccacgacatcgtcgggattatataaatgtctgtatccctcgaatgtggtcttcagtcacgaatgcagcgattgttttggacactgattcactcacttgctcaggatcttgttcattcccatcatatgaacccgttcagtgttgaagacggctttcatcggctcgtcgcagcagatgtagcgtttgtctttcggatcttgcaggtcattgcctttgatatatccccaaagtgccttcacggtcttcggccgtgagagatgagtctcgcccagtagggatgcaaggcttggtctggacgcgataagacaaccggtaagtagcagtcggaatgacagactggatcgtacgcacgataatagcatgggacgattgaaacctgtatcaggagcttctccgctctcattagtcgctggtttacttcgcttcttcttcttcttcactactgcttcaactcctatggtccccccttctccgtcgcttccgctaagaatcgccgcgcttttgaatttggctttcgagctgctcgacgccttgatcttggtgggtgttcgaccttgtccgcttcggctactccgctcccctctggatgtaccgttcagttccgcttgtaaagctcttgcatacgactcgtcgtccacggactgccccgcggcgataggcttgggcttcttgatcggtttagtgtctggaacgtcggataggctgcgtttcagattaggtttcggaacgggtcccgatgtatttgcagtaatagcgccggtgcgaagttcgttaaagatctcagcgatctggaggcattaggatatacaagaggctatcagctccttgtgtacttctaggttgcacaaccaagtgatgataccaacgttggcatcaatttcttccttgttcgctttgatccgttcggcatcgattccttgttgaaccagattttttcgaaccgcttttgcggacctgaatatcccgtgccgagtccttcgtcgttaaatttttacacaggaggaatagaagcctctcgtggactcacaccgagtccaaatctgctgtcgccaggatcagacggatctgcccgatcaacgacgcgacgaactgacgacgtgtcgtgcaaagggctacgtcagataaagcggtaatgaaccgggtatggaagtcttgcaagtcgtttggacgtacaggctgtgacattatgcaggagtccacacgtctgccgaggtctaaatagacagagcgagctcttcaatccgccggctgtatcgatttccgctggcctgagtgactttttcagcctggatcacagttcggaatgcatgcaagatttttgagcgttggaaaatactgatctagacacttgctttgcaaccatcgatcagggacgtccagagcgtgcttcaagctgatgttgaccgatataggtcgtgttaacgtgctaggcctccgacctgatgattcatggcagatggttcgccgatcgagcggtaacttacggcgacacgcgacgggcgacgggcgaacgagagagggagaagcgaaccagccgctggtccccccacgacatctcgtgtccgtctgaagtacaattcatatcatgcatatcgttcacaatcatttcgacatttttctgcaacttgtagagctcggaagagcgagcgaaaggtctgcgtcacgtagctgcagcacaacacaaatcacagagggtctccgggatgataccacagcgatatctcgctccgaaaattaggtagaacgagcgccatcattcggacagcaacaccgcccggtcggtcgctctgccccaggaggaacgtcgataaaagaggctgcaaatatctcgtagcaaccctggccatcatttgactcgcttgattgattccatcgtgacgccaggaattctccaagatgtcacacgctctgctgtgagtgcggctgaatctgaacgcgctctatatgatcagctcaccctgggatgccggtgtcaccaggcttcggctgttcttgtcgccttatttttcgatttccgtggcgatgcactacctcaagacatacccggagtctatcggaatcagtcactatttatgctggcgcatgaagcagatgaaagcagaagaagtcgagttctactggccgcagatatggcaagttgaacgtgacgaatcttgaacggccgaaccgtactgacttctctgtcaatgctgttgcagtcacttactaatcacccgtcctacggaatcgaatgctctggaaagctttgtggtggaaagagcagaggaaagcacccattcggcgatgctggttagcttcagttcagaatcattgctcgctgtcctccttcctaacatacgatttggttctcagacgttctggttcatgtccgctgccctacgagatctgatcgctacgcgggccataaatcctcaacctttcatgatctgccaacgggttctgcataggtgtcacgaaatcatattcggagacgcgccggacccatctcagtccccctacaagtccttgccgacaacgccctatggatcaacggttgtcgttgctcgctccggttcccggaagacgcctggcgctcgtatgggagaagctgcacggagagccgccaccggtctacgagatcgttgtcggcagcagaaggtgaacgcacatattcccgctactctggtcgggatgggtgtggttttggcgggcgccccaggaatgccagacctcgtggaaatgactggtcaggtggctatcacccagggccgcagaccaagagatgatctggacgacacacggaagagaattgaagtcgctatggatgagggatccgagggacctcgagggggcgaagatagaatgaatcggatacagcggggaaatgcctcggcaagcgatgactctgagccagaatcaagtcaccggcgggagactgtcacacgaggatcgatactggtgccatcgcacaaggttcaagggcattcggcagcacggccaactcccgacactatcaagctagactccccacccaagggtaggaagtcaaggatgcagcacatggacaacgaaagcatggccaatttgtcaaatcagggacatcatccttcccatacatccccctcaatcatccaagtatcatctccgttccagccctcacacctgctgccctcgccttcggctcccgaaggttcaagatccggaaggaacttgacggcgccaattcagaacgatgtaccgccggtgcggccgtcatcggcagccaactttacccaatctccaactgcggcgccattccacagtgtgcctagccttcctgctcaacaatcgcggaataatgcgctgaggatgcccatgcccagcgccgagagtctggtctcgatgtacgatgccgacgcccagcggtcattactaaggagccactattgccgaagcgagtttcgatttctgtccgcgctcgaggatatcagtaccaggttactggtcatccccaagccagccagactgagcgctcttcgagctgaactgacgggtctcaatcacagtcttcctgctgaggtgtgtatgccaatgtggtgtcccgcagatcacagccatgaagaaggaggtgaaactcgcaacggaacgtctcttttaggcaggcgagaccgggaagccgccgcgagagtccgaggtcatcacaggatcgtccggatatccccaggggacagcgtcgtcctgaattcggcgcagaaggtgccatatctcttgcacctcgaaatccttgaagacgatctcgacttcgacccgaccaggcgatccaatcgcgaattgctcaaaaagatcgttgtgcaagaggaatacaagaagcgcaaacgagagggcatcgagactatcgagaacggtccgcggggcaaggtcgatggtttgggctggtcaacgctggcattgagtcacaacggacacggcatctcggacggccggcctcaaaatcgaagacccgcctcgcctcgtcgacagagcgggccctcgtctcccatattgcgaagagactcgttggaacctcgctcccccgaggaacccgaggaagtcgacctgattgagcagctctttgggtccgactattcctctaaggaccgaaaggtcaatctggcggattccctgcctgtaccggtggctcctcaaaacaagcaccttgatgctgccgcttggtcaagagccgattcttcaccgggactttccaggagagatccttctatgagccgggctgccacgcctcctacggaatctccaagcacgctcaaaggcaatccgttcgaagagacctcgcgcgctcaagttccagtggcaagtccgaaagtcaccaactcccgacctgtcattaccctggaggattactcggaacgcatgcggactgcagctgtgatgttggcccaattgaatgcctccatgaagccggacaaagctggtcagcagggatctcagaacgaggtcggagtcgctgctggccgaggagcaatcttgagttcggttggcggagcagagagtctcgttgacggttcgcccgctacgaacgtcccttcggtctcagcaaacagaatgaaattgaatccgattcaagctacagctatccgtgatcgaatcatgcaagaaatgatgagcctggaggaagaaagggtagcacgtatgacggctcagccagaaggatatactgtacaacctagtcatagcgatggcaagactgcagaggacgagagcatcattagacgggaattaaacaaagaagatccctcaggtaaggttgggtgtttttatcttgtcgaccttttctgacgattctacgtgtcatagcgatcattttcaaggaatcctggacggcaaagaagagccgcatacaggcagcatcgccctggggccatctcgcccgatggaacgttctatccgtcatcgtcaagactggagatgatcttcgtcaagagcagttggctacgcagctgatacaacgctttgggcaaatttggaaggaggagcagtgcgattgctgggttcgcttgtaagccgcacacagatacgaagggagaccaggcggtttatccggaacacgttgcgttcgatagctttcgtatattagtcacaggcgacaacaccggtctggttgaaacaatcaccgacgcggtttctgtgcattctatcaagaaagcagaatatgctcgtcgcatgactaccggtgccctagggaatgtgactctgatggactatttcgtacaagtgggttgatcgaacctcttgattggagccacgcacaccactgacaagttttgcgacgcaaagacctacggcgatcctgactctggcaggttcgccaaggcccagcggaacttcatcaaatcgctggcggcgtatagcgtgatcactttcctgctgcaaatcaaggatcgccataacggaaacatcttgatcgatcgagacggacacttaatacatatcgattttggtttcatgctgagcaattcacccggagggaatatgcgattcgaggctgcccctttcaaattgacaatggtaggtggatttcccgaccgagaatggtgccgctggtcgaagtcagttgaggcttatccgcacgtacctgtaggattacgtcgacattatgggagggctagactcaccaggctttgctcagttcaaaaagctcttcaaggaatgctttgaaactgcacgcaagcattcggatagcatcatcagtaagctcgccgctacggtctcgaacagacttttgtcggcttacaattcgtgtcgcaatcgtagccatggtggaattgatgcagaagagtgagtgctggaaaacagccaacattgtgtcaaacgctgacatacattatcgtgttacacagactcgaagctcgattgtttccagatgtacggggagcaaactgcgaactatctgcgagagcgattccaactcggtctgacgactcaagcagtcgatgcgtacatggagcgtttgatcctgacttcagtgggatccagctggacgaggctctacgattcggtaagtcgacctgcagtctgtttttgtttcggacggcgactagagacagacttgcgtgaaccacagtatcaatattaccacgaaggtgtactataaggcatagagagtggtttctttagtattacagcattacagcatatgctatgtggcgaagcgcagaaagtttgttacgtccatgcatacgaatatacatcgcttgtgagcgacatgtaatctacccaccaactgccataacatggcctttacctccttgcatgacgcatagtactcgtaggtgttgtgtcgatcactgatcactgatcactgatcactgatgtcgctgaccgttgaagaccggccggaccggctgatgacgcgtcgcccgttgccatcatgcggaccacgagacttgaacatgatcattctgctcgagcaaccttgaatttcaagagtccacctttcgacgattgttattgcagtcgcataaacagctcgataagcgttgattacgtcccataagcctagtcgttctcgaatatcagagcccaaagacccacggcagatgacaatgtctagcctattccctaggtttccaatcgctcgtggccagctagcctcgacatcgagatcgacccggcaatataccgccaggcccttttctggcatacactggggagctcctctaccgatggcgacatcgtctagtggctctggcggaggccggacggacgaggctggctttccggttgtgcgagatgcacttgtgccgatggtgatcgaacagaccgtgagcacggttttgcagctccaaacaattggttggacgacaacaactgatatctaaacttttgtcaggccaggggtgaaagaagttacgatatatactcgcgattgctcagagagcgggtggtcttcctcgggccggtgcgtatgaggcgaccgccaacccccgccgatttcgattgctcagccaccaatccttcttcaaaacaggtcaacgacgtgtcctcgactctgttaacagcacagcttctctttcttgaagcagaggattcaaagaaaccaatcaaactatatatcaattctccaggaggcagtgtaacggcaggcctaggggtttatgacacggtgagatcgaccagcttgtttctgccggtatttcgattctgatcgaggcagtgctatcttgcctacttatagatgcaggtaagtcactcaagctctctatcacgacgcaccgcgagttctaagtctgacccatcgaatgacttcagtatatctccccaccaatgcatacattctgcatgggtcaggccgcctcaatgggctcgctgttattgtcggctggtgagcgatcgatgcactctttctatgatgaagatgtgacacagctactgattgcccatatcgcaataccccaggggcaaaaggtcatcggtactgtctaccgaacgcgagcgtgatgatacatcgtgagttgcccgatcggctccatttggctgctcgctctgatgctccctttcatttcaatcgtaaagaaccttctggaggcgcgagtggtcaggcgaccgatatctctatccacgccaaggagattctcagaatccgtgagctgttgaccgaaatgtatgccgagcactgcgaagtagagggggaaaccttccagggagcgaaggatagattcggtatgtttcgatacatccgcctggatgctgaatcatgcgattcattaatgcggttgatttctgattcagaacgtgcacttgaacgagatcacttcatgaccgcaaaggaagcgctcgatttcggaattatcgacaagattgtacaacgtcgacccgcctcagctagcggtgccgcggagccacccgcaaaggataaaatgtagatacatggtgtctgcatttctgtagggtcaactttgtgatatatatccaagcataagattacagcgataccacgatctcgcatgcgagatatcgatcgacagcgatgaatattcgtaaatcatcgcctcatcggctcccaaatgacgcgacgcgatcaattgattccggagtcgaccgacctcaacccgaggcaaactggtctctggacagaaaaatgaatctatcgtccgtcgtagagactactttaacgacacctcaaaagttatagcagaagcttcttagataggcaactcttgcacaatcgaaaaactgaaaatatggcttcagctcttttgaacacggctcgttttgcctcgacgcacgctgcgccgctgagcgccggaaagcacaagattgtggtcatcggtgctggtcagtcgggttatgctctcgaatcaatcgtgtagtagcttatttccgtcgtcttatgtcgctaaaaccgtaggtgctggaggtcttgctgtcgccaatcagctttacaacaaattcaaggcagacggacgggaactggcccaaggcgatattgcgatcgtcgatgtgcgtataacattcaacgcttactaatcttggtagccatgactgacaagaccattctcacagggagccaggactcaccactatcaacctgggtggactctcgttggcgccgggatgagatccaaggaggagttcgcccggcctatggaatccgtcattgcgcctcattttgcgcacctcaactccaatgccaagactctgaaccccagctccaactcgttgactttggaaagtggcgagaccgtcaaatacgattacctcgtcgtagcacctggtttaaagagcagtgagtccacggacgaaagtgtggcgtaccttccaccccacctgactgacccctcgtccagagttcgatgccgtcaagggtctgactgaagctctcgccaatccgtactcgtcaaaggttgccagtatctactcatacgactcttgcgacaagacatgggatctcatcgaaggattaaagaccggcaaggctatctttacccaaccgttcggacctgtcaagtgcgccggtgcacctcagaagatgcttcacatgtcatgggacagatggcagaagactggacgcggtgacgctatccagagcgaatttgttacaggattagtaaggagaaggacgattcacttccctgactgagctgttccgctgaccaaagatatcgcaccagcccgtcatgttcggtattccttactacaacaaaccgctcgacgctcttcgaaaggaacgcggactcgatgctacgtttaacgcgaacctcgtcgaagtaagggagaaggaccaggtcgccgtcttccaagagactaccggtgataagaagaagatcgagcggtcctacgactttttgcacgttgtccctcctatgggacccctcgacttcatcaagtcgtcccctctcgccgatgctgcgggatgggtagatgtcgacaaggcgactctccagtctaccaagtttgccaacgtattctccttgggggacgcttccagcttgccaacgagcaagacggccgcagcgattaccgctgaggctcccgtcttgaccgaaaacttgtcccgcttcatggagactggcaaaatcggagaggccgcctacaatgggtaagtacgatgagttatttgcctgagagtgatgagctgacggcgttcgcgttgcctccacagttacgcttcctgtcctttgaccgttgcgagcgacaaggtgcttctggccgagtttagcggttacactcaggaaccgatggagactttcgggaagtttggtatcgaccagcgaaagccaagccgactgttcatgcctttagtcaacaccgtcttcccctacgcatacttcaagtactctctccctggcaactggtatggtcctcgcgggctgatcccgcccacctatgtccctagcgttgtaccctcttaaatgatgcaggatagaagtatatagattgcccaagagatatttccaggtcatgcccaacgctgcgtgttgcacagtcatggtccgattccatagcgaggctcagcacctcagttgaacaggtcaccacagccatcgtcgttcgcttgcattattgacgacgaagccaggcaggagtgatatggtctagacgagtagcgcgaacggaaacgagaacccaagaggagggcgtgatgggtgtgcagaggttattgtatacgactcccttctgcgaaagctacaatacgtcccccttggttgtcttgcgacctcttctctccataacatcgttccctactctagcgcaaagaagacgcgcttagacgacggtaccggcgttggaagcgatacggggccacaagtcggcacactccttggcgacgggtccggtgatggcagatcccttcatctctcccttggggttgacaatgacaccactgcgacagcggatccaggggcatcagtatcgggtgcgcgttgcgaaagtggactcgagacgtgatcaactcacgcgttgtcctcgaagtagaggaagacaccatcccttctcctccaaggcttcctctgtcggacgacgacggcgggcatgaccttcttcctcaactcgggcttacccttcttgacggaactagagcacgggcgatgggggcctggtcagaaaatctctttgcgaaaggagcagccagactattcatcaaagactcacgccatgaccatgtcaccggcggcggcagcgggaagcctgttcaacctggctccacatccaacgaccgaaatgacgtagatgttcttggcacccgagttgtcagcgcagttcatgaccgctccgacggggagggcaagagacatgcggtacttggatccggtggcggcggctgttatgaatcaaggagggacaataatgataagtacgttgagatgggatgtatggttcgcgcgcgtggcagagcgagagcagagtttgtaaggtaaagcgtcgatgtgacgatggtcgttttgagcgggatgctggcccggtcgcggtttcgcaggatgccgaacaggacggcgagtgcagtagtccagggcgatgtgggagtatgagtccagtatcgaagtgaaaaactgaattcctcaagcctgtccgattgttcgagcaagagacttcgaatcgctgcatccgcctgtccgcatgtatcttctcccatcgctttaggtctggaggcgtccataggaagcacgtctagacggtatagcatgtcgtccgggggcgcacgcggaccattccctggcctacgctcccgctgtgggcggtgccccgatagttcgaaaatgatggggagtcgtgccaacgagctggtggtcgaggtggccatgtccagacagtaccaccagtgccaacacgaccgttctgaacgcctcgaggttgtctctcctgacgtccatcaagcccgcagtccaatcccgcctgtccctcgagccctaaatgtggtctcatctcgacttctttctcctgcgagcgtcgtgaacgtaacgtagtcgatcgatccgtccagctctgatgtgaaagttccatgtctttgtcggcccagtcctctttgtcgttcccgttcccgctcgcattgtcctatactctgctctgctctgctctgcgttcgaggaaaagtacgtactcttggacatctttaccaaactctagattgaagtcgttgtcgttgaaagggggcggaacgaaagggtatctagaagaacgggtgagatttgtgacgttcaagatgtcgacgacttgatccaaaacttgccaggcgggcgagcaaagcgtcgccgtgagtatggtcgtggtggtcgtcgcgcgattcgctgagagcggtgagagtggtagtgagagtgagagctgagctcaggccaggccaggtcctggagctctctgcctctgggtgccgagagacagagaggcagggtcgtcgtcgtcgtcgtcggtcagacgcgccgctgcccaaaagttgagagggtggagatacgagcaatgtcctggagaaagcgcacgcgcttgtcgaacaaacgatgcgacgcggcttggtcactctgaagttgatttcacattctttcgtcggcgccacggacttcagcgatcatgacatgtccgctgtcgtctgacgcgatcacgtgggctcatatgctgacgtaagctatatttgagcacagccccggccctttctcctctacagtacttgttgcacgttgttgtgaatgtcaacgtcgagattgatattggtgcatacctggaccttgcaacctccgcatcagcaagtcgcgcaagtcatctgctgtcggcaaggcatcatttcgacgccacagcccttttacctgtgtcgcatggacaccaacacgacctactgcgactgttcggctcgtctcgatgagatggtcagtcatcccgctgcatcccatcgtgtggctcctggggacaagcggcgtggtcgcagcgggagcgccaggacggacaatcaccctggaggacttgccacgtcttgtgtctgtccatgaacctgtaccaaacttgactttggcttcggacggagaagctgtatccttgcaaagtaatgcttcagtctacatatcagtgccgcccatctcgatggatcagcagctttacatcacgatcaacgtgtgctctctttcatcgtccacccaataccctactgttttggtatcgaatgggacgtcattcttgtcgacaattgcagcagagaaccaggcagccttatcaccatgggacgatagctacctcgccgaacccccaaaagtggaccgatcgtctggtttcaacgaaaaggccaaagctaaccaggtccgagaagttctccgaggtcaatacgtctgggatatcaagctagatggtaacgctgggttcgccaattggaccgggtggatgggagacggcggcatgatcggaatctttgcaagcccgggagatgcgatcgacgcagagatcggtctgagactcggtggtgagcccgccatacgattcgccatggcgtcggcaacatcctggactcagcttacctcgtaaccctatctgtgtgtgtttcagcgcctcttcacgccgtcgctcagagtctcccgctattgggcgatacgacaagcacccaagctctcttcatgtctgccgcactcgaatcgctggacgattatcgcacggtgccgacctacccaaactacaccctctcttcgccatacccggaaatgcttgatgtcccatatatcctcggcaagcccatttaccaagcgcgacctatgtatcccattctactcgacactacggcatggtcgacgaccagaggtcccgccacaaatggtttgggtggcggcggccttgatgctagcatgtgcgccattcaccggaaactcaacgagacagccgacctaaccgggttttcaggcatcctcgacgattcttcacggacagatagtttcgagacgagcacggatcgttctacagcgtcctttcttcaaagaccctcgggatggctgtgggattggctggtacaggacctgcgaccagatggaaccaactataccgtgtggatcgtggaacccggtgatagcccaaatcgtggggcgctctccggcccgatcagcttcgtcacgaaagagggtgagttctggcatcccgtagagtacgatgacgacgtgactaaatagtgaagaatccttgatactcagcttcattccgttgccctttggtccatgggctgggtctttgtccttcgatcgcgtatgcagccccattgaacgtctcgtccgagcaaccacatccgatcgtcacctcgttagaggagcatctcgaggaggccttgatcgcctcgctgaacggattctctacgtctttactctcctcggcgtgtggcagagacctgttttctccagtcagcacttgtgcagactgttttgacgaatatagagaatggctctgtcgcacgatcctgccgcggtgcgcatccaagcagcaagtagccgcgtcagatgaccgtacggggacgcgatcgacgaaaggccaccagaacgacgcgattcccatgacaacgagtcggacccgcagcaaccccagaactccattctccgcgaatccgacatacccctacgctgaactcctcccctgtatggataattgccgcagggtggatcgccgatgtccagtgttcctgaacttccgttgtcctctgcgcggtgtaactgcgaaccagagctatgcgtattgcggctcggacgcggaagaccatggggtttgcgaaggtgagatagacggtggcaccaatcggtggggtcatgtctggtgtaacggatttcagttgtagtaatctgtactggccatatcaagatcgctcgttgttgagcaaacaccgctgcccggtcacacttgtcacttcaaaggccgcttcacaagcaagacgtggccagtggctcaatggtgtttcagacatcgatgtgaacgagacatgcatggtgaagttcgtgattttgctgatcgctacaactggaaagaccgcatttcatcgagcaagcaataatattcgtaacgcttggtagaccagtgatccctggccacgcatcacgttttcgcaacccgtcgggtgaatcgagcggatctcaatggacaacccactagagcaaagcctcgacaaccttgtaggcaagggatcagtttgaggggcaacgatgcatagcagctagacctctggctcacggcattgtcgctgatgttgttgacgttgtttccgcgatagttcaaatccgacaaggctcggatcacctttaatagcccacacatcgatcaggactagctctgtgcatctgaagctctaggccatgcttaccgccgcttcctcaaagccaagaccaacaaacttgtccacgtccttttgcgccaagcctgcctgttctgctttcgacttctctgatgtatcagtggcgtcaccgacgacgcccggagcccctgcatattggacagcccattgccttgccgtctcgtcgaaagaagccttgtctcgtttgtagtgcccggcgactaccgggatgaaggcgagtcaatcggtgccatgttgctgaaaatcgtcggaaaaacttgccttgagcatcctgcgggtcgtctggctgaggatcggtcaacagactttgcagcgagatcaaagtactcttgagagtgaggacagggctccaattactcttcaggatgtctgatgggggattatgggtgagttcctagattcgtactgtcgcaatgactgcatttgctggcgtcccgtcttacccaggcagatagcgccctgcaacggtcgagatgagtatcagaatctcgggaaggccacatagcggaccgtgtactcacagtcaccgaagagacgttcggatggtaaagcttgctgtgatgtatgaacacatcggatttgctcggtgaaccgtggcttgatatccgaaactcgaagcaactacaactgacgtgatgaatcgcatcttaggagccgagaatggataagtgtccgggatgacgatgtccacttcgtatttccccccctcgtaaggtgaattttcctacaaggtgttcaagatcaacccatgagaccccccgccaataagcttgtgcaatgtcgatttaagatgttacttacaggaccgataaatgtgcctcgaaggtgagttggtagattgtcgatcactatttccgtccagatggatgagatgagagtcaagctttggaagccgccgaaaccactggcacttactatcgacggttattccggacacctgatctttctggcaagctacgcaaagcaattgaactttgcgtacggcggagcctggaggtgaactacaagcccacgtaccagcaatctccttgcggcatcttcgaagtcgagcatcagacatgttggcggtctagagttgatttgagagcagctgtggtcgagagctgtggcggataggataagattgtgttacttcacacccgtttctcacagaggcatatgttgacgcagcatcggaccgttccaggagggagcagcctcgaagacgacgaccacaacgacgacatgctcaatcgagatgatcgctcggtcgatcacgcgagtcgactcgcgatcggcagtatccagcaaataagcctccgcatgaggatccaataacccgagcgatcccaacacatggcacatacatattcaagaggttcaatcagatattaccagatacgagctacaaacgatcctctagaattctgtaatatcgtattacattccgccacaacgctggctcctctcaacccagaagatcatcaaacgcggtcctgctggaacccgcattgctggacaggccctgatttccagagggcgccgtggattttgcgcttggtgcgttccataaactgttcatcgttttttctcgatcgaggtccaacattgacttcttggactgattgcccaaggaagtgtgagtggcagcttgaccgccgatgccagccaagctactcgaccagaggtcgtcaaaccctccgtttgcgccgccccccgtaccgctaggggttttagcggctgggtgcgaagcgaaaccggcagaagctcgaacgggcgaggggtttgtaaaagtgggcaaaggtttgctggagggttgagaattcaacaagtcgaaaacattctgactggctcctgctgatggcgtgggcgcggttcgcggcggagccggagcggcgaccgcagccccctgaaagtccgcaaaatcgtctgccgaatgcaacaagtgtgaatgagcactagcctgcagctcgcacaggagagagactgcttgctcaccatcgtcttgcttggcaggttgagccatctgactgcttgccatcaccggaaggctgttatcatcgtccccaaaatcaaaaagatcctgtacgaccggttgtttgacctctttaggaactggaggtcgaaccgaagctcgagaagccgatgtgctgggtttgagttgagttggcttaggcaccggtggctgagtctttccgacgggaagtcgatcatcatcgtcaccggcatcatattcgtcatactccggttgaccacgactctcggtcgttcggtatacgtctgtaggtgaccgtcaccgaatttcagctcgtgctttgtctgttacaggaagaacagctcaactcaccgccactgtcatgatctgtgcgacggttctccccgtacgcgttcccgctcgaatatcggtcgctcgaacctgcagtataccgtccgacgtcttgactaccgaagcccccgtaccgcgagccagatcctccgaagccaccgcctgaaccatcgttgccagatccgccatacttgttcttatttgctttggctttcctgcgctctgcccggatgcgctcgacatctgacagcagttcggcaatttcctttgcccggttgcgcactaagcatacgtcgtagccatagccgtcagcgaggaggcttggcacagaattgaggcgactggcgtaccattgattccctgatccttgcccttctcgtctgtatagtggaagctcctaagcatcttgaccgtagcaatgtgtccccgcgcatcgtcgaccacccgttcagagccgttcttgacaaggtactccaacaacgtcaaagcctggaaaggcacagcagatcattgatgatgcttagcaaagcccagcggtaggatggcgaaagggatgctgcgtactttatagatctgtctccactgtctcgcttcgctttcatggaatctagaccaaatcaatggaagaatctcgttgaaatgttggctataagcaattaccgtctcgaatgagctatatgacacccaggacatagtcgaactgagttctgatgtggagcttacaagttatgggtgctggcctcgtcaataaagttcgagccacgatgagtgtcgagaatatcacggtttaacaaggctggatgatacgtacgcctgtgctatctcttgcataagggtggaggaagcccccctgagaaaacatattaacataggacacttagtggcgcatccgttcgctagccaactcaccaaggttcgtctggatctgtagcctctcgaacctgggaagatcgatcggctgagaacggataacccggtaatttggttcccggactggctcaccttcgcttccataggcgagacgttcaggattgcatttctagcctggttgtagtaagacttgacatcgtaaaaagtcaattgcgaagcttgcttggcgagctctgggttcgtccgactgaagatcagctatcaggtccgagatcaggctcggccattcatcaccttcaatcttgtccatctcgtcgaaatcctctggtcaaggcggccgagtcttcggtaccaaggacgataacagctggtgcgttgaatcctatatgctaagagctacgagttctcatgacagagtcgagacaagcggagaagctgagcagatgcgaaaagccgtgcagaagaagatggatactgctgcctctcaccctttgcgttctgagtcccaacgagcgctgctgctgtcgcgtggcatggtcagggtcaggacccctcctcgacgcgtgcaaacccgatggcgtttcgcgtcagaaagggctacccttgacaatctgacccttgtttcaggttcaatcgtatcaaggatgtcagtagaatgttgtaaagtaaatctagtacaactgattcgttagttccatgttccggttgagctctccgctctgcatgtcgaacgaccgtcagtagtaacactgaacatcgacaaacccgtccctttccaacccaaatgacagcccacaggcgaggaatcctcttccttgtactgcttcaagtactatgcgagactgcaatcacagcatttcctcttccacaacagacggcagatctaggttcgagcgccagtcagatcactgcacttagtcccgctgactcggatgcggcggagacggcgcaggcgaaatcgggatcaggcatcagtaacgccgaattagtcggttacgctgcagcgggttggttcccaaatttatattcaatgcctgcagatatacaatttgacaaggaattctctttgacaggtatcgctgtacttgccgcgattgcggtaggcggagtcttgtacaacaggcgccgcaagcgcagaatggcgagcaaggaggatagcgagacgatgaagcgagaaggaccatcggacaatgcacctctcaactctcgcgaaagccattcccctgcagtcaagaacagaatgtcagaatctccgcttgttggacggaacctagccggacgaggggcagcggcgaacgcaagatctcacattcgtcgtaccaacccagagcaggaagtcgagaaaggcgagagaaagcaaaaccgggattcggagagcgatgaggaaggtagaccctcttggccgagaggtgctcgccgatctcggcgtaagcctaagatcatacccaaacggcaagaggtaagcgagagctccgacaccggaacagactccagcaccgacgagtcggtacgaagcaagcgaaggtagtcgccaaggtcgtgaccctgtgcagcatatgtgtctagtcattacaatgtgcgatgagattgtatctgagtcttaccagcgaaccgccggtgcaactatgagcaagcatacccatgtacacggaggtttatgctaggagatcgtacggtcaattgcagacgaagatcgcaaactgtctcaggtgtctcatgtctcgtgctgtaagcttagaaagaagtgtgcattagaagtctggtaagaggacaaagcacggacaagcagcgggatgatatgagtagcgttgatatcacggcggactgatggcagagtcacgtattagcgaaggtggaagtctgggtctatcgtcttggcatgagcgagtcggaagtgggccccaataggttgtataacagctagatttgactcacatgtctcgaaagtgatatggaggggcgttgttgttatggagacgaatgataactcaacaggtggtgcggggtcacttagagtgcggtgtttgctacactgtacacttacttgctgacttgccagtcttagcatggaatctctcttgatacaactcttgtaatttggtgtagttaaataggtttaatgttgagcataatccgtatgctgatggagtggagggcacggtcccaaactgtattgcacagacagacgtattttgcgggtcatgttgtcctgcttgctcagtaccaggatagtatcagcctgtagtcttgtgttggcaatttagctaggtatcggcgattgactgagctgttccatagtctgtcatgctataatcagatttgccctgtagtgtatgcaggtatttccaacgggatttggctgtaaggctgtgtctgatcagatgacaacccctgttgcacaggataaagctctgttttgcaagaaaaactcaggggacggtgtaagctgagatgggatcttgttcaatcagcattgtcttgagcagcaaacagttcacagtatgtgtagcctgtctcctagtgtagcaacaagtgtaacggaaagcagttgtggaacttgaccttaatgatacgtgacacgatctagcatatttcgtcaagttcacaaagtatatgtgagtctgctatcaacattgagactcgatgctaccggaaacagagatttgactggtagagacagattggtcgttggatgtattgtcatctcctgtgtttgggctttagggtctgtgtttgattggcagcgattgaaacctctttattgtcattcagatatctacagcatgttgaagaatcgaccattgacatgacatacatgctacgtgtcgacctgacatatgcatattggtttcaaaaggtacacttcggtacaaagcaacagttttgttgtagatatatagctagaagcagtttatagtacacagcaactgttaatggactgaaatcaattgtcactatcacatatcctcaatgatctttgttacgtgaccctagaatactacaccagtggttgagtaccccaagaaccttacgcaactcttgcaatagcatctcacagtacttcgtcgcaaacatctttgacgttcgcacaagggcaattaaacctcctgtaacacccaagccctttgattagtcgtttactgcacgtcgtaggcagagccggcggacgctgttcgctcttcttttgtttactctcttcatactgagaccaaactgatagctgttgtgttttgtcttgtcagagcctgtcgcttgactgcttgcaccttggagtgagctctaatgtcgaagccgaacaatccgaaccgttgacttccacgacaaataatgccactgagtgagagtcttgtcctgcctgaaatcacgtctgatactgatccttcttgctgatatttgttgctcagtagatgcgatgcaagacatcgaacgtggaatactgatcataatgaatgacacagaagtttgattagttggcaagatcttactgaaactggttatcataaatgcgaacactgtcagagacaatcattccaactgacctctttggacagatggcaacctagaccttcaagcttggaggtaggtggcactagtcaaggaaattgagacaactgaaagtatgaatggtgacgaattgcatatctcaggcaagacgaaccggtgggaggagtcttgcctcttggctcaagagtggaggtgcccttgtcaaaggcctgaggttcaagagtgttgctactaatccatagagcgttctctttctgtttgctggattctcacatctgtcagttacattataaactaatgcggaaaaataacaaatcttttcattttcaatcgcttcattgtatgatcttataacctagtcaacagcgcacaacgacttgtctcaattgtaatctttttcttcttcttttttgccactagacgtgacagaagttgcacatataattttgagcgaccgattacaccatcctactatatttcagatacctctttgagagataagagacaagatcaatcattagactttgtctccgcctttatcctaagatctttcaacatatatacacgtctccaaatcacactcctttgtactttctcatacaatttttcctctcaggaaattattatcatatattgcttctttccggaatctgttgacaactctcataccgtatattcagtcccttgcttgacactgcatcactctgtgtcaacaatattgttcaagtagcctacagggcagacatcataacccaacctgtttgttcaagtcgcttcatttctctgtcatgtgtctcaatacacctgtgttggagattggcatgctatgacatcataggggatgctcagggtgcaatctcaagcacaaagggtcaccatgtgtttaggatcacgtgttgtgactggagtcacacatctgtgactcatttgcgactggagttgcacttatgcatctgagtcgcaaatccgcaacaagcctagtcgcaagtacactgggaggacactaggaggacatgctcatcagaatagtatatataggagaccatctggacctcatttcctttccccctcccatgtactactttactttttatgcaagcaacattgatcatcctttcacaacaaggcaacatttgttctatcatctgcaagagacaatagacatagtgactacaaccactaccaaggagtggctacacaccgttggcagcagccaatatcacaacatataatagtgtatggatccccaaggcatccattagcccacatgcagcatagctgctacccttgctggtgttccacttacttctctgtggaacatcacatcaagacagatagtgcctcaagacttcagttcaagaagcctctccacggtatttcacatcggtatccgttacacggaatggtcctgccgagcggtatatctgaatccattcccgctattggtgcaaacttgacatccttagccgcgactgcagctcgtcgagggacgcctttttggagaaccttggcaatgtcagccagagcctgtctcagttgcatgggctggaacggcaggagaggatatttcacgatcaaggaacccctctgcccttggatgtcaactggcggaaagagatcggagcgctgcgcaacggctctgcagagatcgtgaagctgcccgtgtccaaggctgtgttcgacctgagtcttgccaatggtgccccggtcacaacatacaggtttgactcagagacgaacgacaaccttgtgcatactgaacacacaggacggataatgctggtctcacgatgacactgggtgcaaacttgcatgtagacgttctgtgatggctaaaagtactggtgcggttgcgaagggaaacattgaaatgtgctgccgataccaagtctgccagtagcatcataacctcatctactttgtccccacatgcatagttgttagccttgaggaggtccaaattggaaccgccttgaagtcagctctcagagattttttccagaggtagagtaagtacaatggcggggtatagctaaatatgttgatgacacgtgcagaattgcaatagtacagtattagaagaaatcacactggatatgttttcttgatgtcctctgtcagaaaaacctgaagaggtgctctgagaacgctcttcaaacatgtggttcatagacggtctatttggaaacgtgagacgctataacaatggtcatatgccaaatggttgactggtattgtgaagactgagagacttggcagaaaactttcgatacatttgctcattgcttcttttgtactctgtcacacaggtccaatcgagccaagccgttcctaccatggccagaacaattctgtcgggtgagtagcacgactatatatcacacaagtcctggtctcaatctttaaggtaaaagatgctggtcaagtttggatgcataagaagctgcaccacaaagagccagctggttcaatacaagattggaatctcttgttggcaatgctgccagatcccctagactaagtcatggtcgaggctccaacttgataccgagcttggcctgtgccacagggtgagttcggacgttactgtcagaaatgcacacaacggcccggtaacggtatcgaagctataccaggatcaccggagtgcaattgggccaggggcaggccgcagcagaatccacaggctgttgtgcaacagcggtattgcgtggaacgccgcggaacggtgcaacagattgtagaagtatgtaggggcgggcaaatcagctagaatatcaacaaccctgtaagtctagacggttcaagcgcagttatcacgttcaacatacgcgtaccttgttacttatcaagagacgtattagcagaggttacaaacaatcattgtagatacagggttgttcatattctagctgatttgtgcgcccccatatatattctgcaatgtgttgcaccattccgcgttattctgcacggtactgttgttgtgcaacggctcgtggagtccatgacggcctgcccctggcctgattacgctctggtgctcccggtctaggctcagtgccgttaccgtgccgtcatgtgtgctcctgacggtaacgttgaaactcgccctgtgacaaaattactagttacgaaaaggcttggctagctatagtgtttgttctactgggaatttttgttcaggtgccgaaaattgttgggacgactgcaatcacgggataacaagagtttttgagagcttcagctttcatcacagagtggtgagttcgtgtcagagggcattaccagtctggacaacctcactgtgtatctgccaatattgcacaatcttggggtcgatagtagatttgcattgcaggtgccaggcctgccagattgtgggtgtgtttgataactgaagttgatgacatccttgcacagccaatcttctggttcatatggtattagaaaagacattgacaaagactttgcgcacaataaaccagcagaatatttacacaacacaacagtgcagaaagcttttcaaagtcgtataagctgttgggacttccataaagtatgaatatagtcctgacattcgacatatacctactcttttaaagacatatccgaacaataccaccagcaaacttgttacagggagcactttgcgcttatctgttggtatctgcgtgccttcttattgtttgtatttgatacttcaagcttgatagtatgacctgtgcgttgtgattaaactgagtatccaccagacgaacctcaagattgcccgtaagattccttcacagacacgctcatttccccttttggagttccgcttgctcctctcgcttgctgaactcaaaaaacaacataaccacacagcatcttagatagctcttcagaggagaagagacaagaccttctgagatgatttgtccctgactttgcttgctagcgcccaggcttcatgtatctgacactttcctggagcatcttgcgtgacatcagtgcgaatcgtcgaggttcagtccgagtgagagacgtttaggtagcacctgacttagagcaagtttgagctctgtacagaggatcacggaacactacaatatagcacatgcacctaagtaacgcagcaaaccgacgcacttacacacattacagacagaccgcaccctacagcaccttggactttggcaagacagcttgcaacctagaggtggatgctgacgagcagcttttgagaacagccttcgcaaccactgataggtatgctccgatgtgcttatagagagtgtttctgcaacacaaaagtctactttggctcctttttccaaaaccttctttgaccaggggactttgtatcaatgctactatggtctcgccaagatgcagattgaaagggtctactcgatgtgaagggaggtccagtgggatagccgggtgggcttgtacgtagatgcgccttggtatcaatggtacaatgggttctttgttagacagttggacatctgaagaagaagcgaagcgcgcatcgtggtcgaacacttcaaggaacccgatgtagtccaggctttgactaacattgcggactgactgaaatttacagcaaatacgtgcatctgggcgtcatggcatcggtacgagccgtaacacaatggtgtgacaggcgatcacaccggtatgaccactcatcgcttctgtcgcagaatagtttggaacggtgctgtaaatacgacatcatgtagaggtgccaaaatcagctggaatacagaaagatttgtgacatttcaaacagagtcatcacttctgacatacagtctacctactaatgagacacataacacaaggccttacaaaccaaccccagcaagattgcagaaaaactttcagcaaagcgaaacactacatgcagtgcatcacagtggaggtgtgtgtgccaagattagctactatgctcagtacacctgtcttgatgaacaaacaggatgtcatccgtgcagagcagtgtacagaccttgttactgtgcagacccatgggttgtatctgcggatacgtactgcaatatctcatggtagaccgcaccttggatactccctgggagccccatcccaccctcctcctttccgtccaccacccgtcccagatccaccgccctcctgccccatcgattcgcggcgaggctgcatttgcggcagtgggagacgacatgggggtgcaagttgacgaggagacggtgtgaacgcgggttgttgatagggagcgcagggtggctcgtagacaggctagcgagggaattgggagaggttcaggtcgcactcggtgagtgtcgtcgtgtcgtgtggtcgccgggggcacggactgatcgagccaccgttcgtcgccatgacgtcgggttgcagaactcgggatcatcatcgtcctcaccatggcctacctacaattccgcacggtcccaggtccaccgccggatcccaggagacgaggatccggagaacccgtcgttgggaatacgacagtcctcggaaacaagacgtcggcggcctcgagatcatcgccctcgatgacccaccccttgccactcggggtcagggaaaagaggaacagcatgtccatggcaacgacatccgcaggaacccctgtcggaaacatggacggagacccaaccgatagagaagactaccgacccgggtcgataggtaccgtctgggccacggaacccaaggactatagggactgcctggacgacggcgcagcttgggcgctcttgctcgggccgatattgagcgggagcatgttttacgagacgtgcacccgattgtctcggatgtacgccgaggacaacaggacgacgacgactcgtcctgaatggacatcgaacggctggcgagtcgaacccccgctcgtctccccttccacccgcccgttcgtcgtcgctggcaatggacccgggtcggacggacaggcgagtgaccccgcggtgctcgccctctcggccctggcgtactcgaggaaacaggcgtgtcacctcatgtgcctattgtccctgctcttgctcgctcacacgctgtggtcccgcaagagacacttggccgtagccatgtcgaccgggtcgcaactgaatggccaccacatggaagacccgaccgccacgacgtcgacgacgccaccgtcgccttggtcgaaacggagcgaatggaggaggacgggagcggtcgtcgcgttctcgttcatcttgaccgccgggttcgtcgtgctcaaggtgatcgcccagctggcaggcgtcgttggcagctacggtacgtgatctctgcgccccagacctcgtcgagacggccgggatcgctcacgctcatcgtcgtaccccaccgactcgacaatctagatttcacctactcggatctcgtcatctcgaccctcttcttccagttcagtctgtatgtctgcgtcaggctggcaagacgtgggttcaccctgggagaactcggaatcatctgccatgcaggtacgggactgttcatggaagtcgtcaacttgacccggaccaaggtgcgctaacgagacccagcggtcatgctcaggaaacggacacgctgacgacacccactggattcccctttagatctcaatcttcaacacgccctttgtacggacgtatcgattgcccacccccttgctcatctttcagctcgcgctcattcccgggtcgtttctgtgcggattcctgctctcgcccctcctcgtgctgtcgcgcaggatcgcacaacgtccggtctaccgcttacgttaccccgaggaaaagcaactctatcgaaaaggtctcgccgctggattctatgctggtgccatcttgatctgtggcggtctcatcgggttctgggcgagatggtgcttggccggacgcaatccgctggtctgggtcgtcatgtggctcatggagggtcgccgatggtggtcgagaccggcgctcatcggttactgggccatgctcgcaggcatcagcgtcggcggttggactcgacaactctcacgagcgaggcgacaccgcggctggaccgaggccaaggtgaccaacggtcaacacaaggtcaccgtggtctcgaaatcgagcgccaccaagtcggccggctccaggtctgcatcggtagacgccagtgggcgacgacccaccctgaatcgtaccccgagtcctaccacagatatcaagacggccggtctcggaggtgtcgctagccacatgatggacgagatggatcagagactgccagtgttcagcatcaatgcgaggaggaaattctttcacgccctcgccgtcgtcatgtttgtcccggggatcatctttgacgtgagtgacggtccggccgaatggctacgccaccaatcgaggctgacgaccgacgttctcatctcgctccagccggcattcacccacctttcattctcgctggcgtttgccatgttcaactttgccgaatacgtgcgatactttgccctctacccgttcggcgccgcggtacatctctttttgaacgagtttctcgacaaaaaggattcaggcacggcgattctgagtcacttttacttgttgaccgggtgcgccgggggtatctggctggattcgtaggtccagtcgagggtagcgcaggtcagatgttacgggcttaccagaatctcccgttcacagaccacgcacgatcttgagtctggtcggtgtcttttcgctcggaatcggggatgcgctcgtgagtcgtgctaggcgcgcggcgtgttcacgcgaatggtaacttctgatgccatggggttgcatcgacacaggcctcgattgtgggcaaacggatcggtcggattcggtggtccacctcgagcggcaagacggtcgaaggcagcgttgcgttcctcgtctcgctcgtactcgctggaacgagtctgtcattgacgggagtcatcgagtcgttctcggtacgtcgcgcgagatggctttcctcttgacccgaccgcttggtgctgaattccgtcccgatcgaaaacttgaccgtaggtaacaagatatatcatactgtctctcgctctgagcttgatggaagccgtctcggagcagaatgacaatttgattctccccatttggggttggtgtctcggcgtttccatgggattgtagtcgagggcgagggcacaaggcttgaggaagaccgcgtgggtgatactgggaggaaccacgggagcaaccatactgtacgcaccgaccccgacgcagcactcaggctgcatcggctgggatagagcatgaatgacgttcagaaaatacgacacccttatcaataatgatgttgatgtaactaaatcagcatagctttatcataacatcgcacactcgcatcgcctgctttcccgcgaacggtacccttgttatccggtgcggtcctactcatcagccatgaccgtacaagaccgtcgatcgaaatcgtcgcaacacagaatactgcgcccactcgatacggacggcacactcacatgaatacgctggaaagttcgatccttacgaatggctatggtgggcgtgcccaggatctcttacagaccagaaagcccgcgtgacaggaaaacaccaagtcaaagatataggtatgcttttagcgacaaatcttccggctgcagcatcacgccgaaattagatctttgacaagccttctgctgacttgatcttgatgagacgggatctttcgtgctggacaagcgcgcaattcttcttgattagtgcatggggacccttatcagtcagcaaagtcggcatgaatactccggtccaactcacctcaatgatcctctcaacggcgttggcgccatgagtgatattgaggagaccgggagctgcagatcgtactgcttgcccaatcccacgcttgcctgtagaaacggcagcgaggcggtccagacctgatcattcggccccagtggttatccatattcactggacaattggccctgcttgtagcccagtagctcattcccacaaccgtctgcgcacggcaagccctgcctgtcgacttgtgacacaacaacggttctggacttctcggtccccttccaaaacatgatacaatccttctcaaggtatgcaaatctgatcaaagcatgtcaaacgcacgtagcgagatcagggtggttggtatgtagagacgcgtagctgcatgacaacgtgatgcagctgccttgtagattactggatgtactataagaatcgtgaagagtgaaacgattctgcagcctgagccacatgcaacccatagtccacccctccaatctgcaggcatatgcagacggtgtatctcccgtgatcccaatagcaactgcttctgcttgcgctgcttctgttgccgctgtctttgcctggagccgatgataaagaatcgacaaggaaccacatgacgacgtttgcactttaatgtacctcgatgtccagcgtgaagtgtacgttaagggcgtttagaagcagaaccagcgcaggagatacatcgtggccagatgcaagggatatctcttggtctaaatgttcagctacgcctggtatatcggagtgatctctcccgttgatgatacagatgtttgaacccaaaacattggctatccttgacagctctgatgagtactcttgatatgcctgctaagaaggctgaacatttgcattttgtctttctccatccattggggggacatggtgacttttaaattggcaattgtaatataaattgtgccttctattggtgaaaggcttgcaattgtcccctttccatgctctcaaatgaagaaatgccaggagatgcctgtgactaccagcaagcagtaagttggggggtgggatatgagctttacgggtcattaagatatcgaactcgagcgtcagaatgactcctagtgcatatcgttgtcgttgatagtttgaataaaagagaatcagaattgatccggtcaattatcgcctccgggtcgatattcgctccgactgccagtatcagcccaactgctcttcctaacgattcacctccactcgcacttgacgttggcataacctgtttattcacaatcacctacccgatcatttcgtctctgttcgaccatcggctgacgtaccatctccgctcagatcaaccagcaataagctttgagcgacttgaactcggtttcgagtactttgtccaggccggacacccacatcgtctcgtggcggtgcaccatcatcacgttctgctagttttatcacggtctcgcgagaagcctcggggaatcacctcgcaacattattgaagacgaccttgaccaaggctgcttccagatttcgctgaagactagtacggctggaccgctaccgaggtacgggtcgctcgggctagtagaggatcggtgttaaacgttcccacgcctcacgtcatggctagttcatcgtcgtccgaggtggcacccactacaatcaacacgacggaacgaccgaccgagctcgagctcagcccgaccgacggttccatgtcaggttcaaatcatacgagtgaagtcgtcccgtcccactcgcttccgacgcagagtcagccgggcaggggaagaagactcagccaggacggacagacgaggacgggactcgggatggctcctcggcgtgagaggtgagtgggttgagacgagggcgaagaggggccgatgatgtctacctggatactgatgattacgaacactacatccgcgatcagtgaccggatgattgatcccatggccaggcctccggaaaatcgattcccgacgaaacaaagactctcggcttcatccacctcgtcctacgggtccatctataagaacgcccttcgccaaagctttgacaacaattcgaccaccaaccctgtcgtcccccgctcgtcctcgtcctcgaacactgaggacctcggtcaaatactgtccaccttcaagtttggatcagtagggaatcacccggatcccttcgtcctaggcaccccgacggccgagttgggaccattcgagtacccgatgaaccccgagctggagaaagacgaagaatcgtacaggaggagttccggatcgagctcattgttgagcgattcagagtggaggtacacgatcggcggtggtggggtggggcaggcgcagggtgcatatcctgctggctcgggatcgggtctgggcatgccgacgaggggattggtggaagaggccgtcgctaccggaccggggatcggtaggttgaggagaatgtcgacgatgaatcaggtgatcaccataccagaggtcaggaggcctagtgtagtgcatagcaatacggacccgttggtcgacgtagtcgatgagccaaaggcgtcgggatcggcatcggcatcggggtctcagcgggatgaagtggtcgacgacgaagcggacaaggagacgacgtcgatgagtctggcgcttcatagacgtcgggcgacgttggaagacggtcaaggaccgtcgtctcagcccacgggcctggtcttgccaccaggctccatcacgtcggccgcgctcggtactgtcaacctgatcaacgcccgtcgacagagtatcctcagtttcggacacggcgcacccgtcgaaacgcccgtcccgcccagtctagcgggcaaacacgttccgtacacggcttcgccggctcgattaccgaccgtgggcaggcgagaaggatcgacgtccatctcatccctccgacgtggaagtctgcccgtcaacaacttgcaaggcaccatcgaacccggtcgtcaacgtcagccttcgttgggcatgacctcggtcgggcccggtcgatcggcctttgccagagcgtcgttttccactcacgccggaccgatcgtcttgaacctggggacgaggtacgaacagacgacagtgtcgacgccgtacctgtacaatcgacgcaactcgctcgcccatcattacccattgggcgccgggtccaccacgacgacaacgccccaggtcagaccaggattgccaccttggcaaccgagacggacgagcacgagcgaatattccgacgcggccgggtccgtcggaggatcttcctcgacctcgagcatgcagacgattcgtgggtggaggcaaggtagcgatgcgacgtcgaccccgatgggcttgggagatgacgaggccggagctcgatctatcacttcctcggcacgaggttcggtggatgaaggcttgaggagatcgatggagacgttttcgtttgggtctaccgttggcacctctcccggtcgtccggtgcggaccgacagtcccgtcgatagggaaatggcatccgggccgctctcctcgtattcgtttggccggacgtctttctcgtcatcttcagcctcgtcttcgtcctcgtcgaggaacagccatcagggcggcacgaacccgtcggatctggttcgatcgagaccgggttccatcagcgcgatcaggtcgggtttcaggtcgggcaggaactcgatcgtacagagtcccatctcggccacgtcgagtgaggggttccccggtcggacggcggatgtcggcggtgatacaggacgggaaggacggtcgatgcaagacaacgacgacgatgaggatcaaggaccgttcggaccaggaaaagagaggacgacgatgaacgtcgaagctccgatcgaccaagtcggctcggggtacgattcccaactcatctgttcctcttcctcctcggcttcgtccacctcgtccatctcgtcgatttcatcgggctctcgtgggcatggacgtgggcatgcgggaggcacaggcgggatccggccgttggataggtttggacgtcccaggcctagcggaaggatcggagttggggcctcgtcgtcgtcgtcatcagcacgaataggtgcttggggtcaagctgccacgaacagggtcggaaggcaaggtgggtgtcctgtcggtgagattccgccattccggggaggaccggtaggactcgaaaatcagggcgaggttcgacatggggcgtggacgagcgggtcttcggatccttctacgcccagtgtcgaggacgacgcggacgacgacgacgacgacgacaatgacaaggggaacaacatccataggcgtcgatctcgaggtctacagacaggacggggaatagtggacgaagacgaggacgaggacgacgaggtggacgccttgacaccgatgaccgaggtcgagaacgaggtcgtcctcgcgcccgaggtcaaggtcgtgctcggccatgaacccggtcaaggacctcatccgggattagtcgttggtgaccaggtgccaagcaaggagacggaaggtgggctttatgtcgtgtatgaacgggattagggtgacaacgtgacagatggtagataggatgcgtgatgatgatgaatcaatgtaacccgaccatcatatattaactttacgtatcgttagcggaagcttttttctgtcaaattcccgcgcgatcgattccagctttggttctagccagcctaaagcctcgagattggactcgatcgaacgttgatggtatcatcagaggcctcagaggatggcatcggatgttcgatcgaatgatatcatgatgcagctatgaggataccctttcgaatgaactcgaccttgtatatgtatcacggtcgtagccctgttcgatctgaatcatgtcttttcccgttgaaatcactgagattcccacttcttttgctggcttttccgccctaaccccaagcaaatttacttccgagaccatcatcaaagtagcaaccagattgtcggggttggagagtagtggtgacgacgtcgatatgatgatatgcacaacctagatcgaacgatacaaacacctaggttcgtcgtctttgtcacagctaacaaggcactgaaacctcgacccataaactgtactctgaaaagctggacgaggatgcgtataaagatggaaacgtcggcctaaagtagatctatctacctccatctaccacccaccaataccacctcttgtgcctttcactgacgaccaaccgcgagatgacgccatacgacgcagcatcatcgtcgtcctcgtcgccgtcgccgtcactaggccatgatcaagaggacgaaaatcgccataccaagccgaacgaaggcgaaccggcggccctctcacagtttaacccggacgacgaggacgagcgggacgacgtgagcgttcagaaatggctcgatttcctctcttcctgtgcacgtgggatcccaccgtacgaccaaaccccggagagaccgccattaccacgtcggttggtgagacaggtcagagagatcgtcatcaccgatcccgagaaacacgaggatgaactggacgccgacgaggatcaagaggagggcgcggaaggaagaagagacgatgacggtcgcacggccgcaccggatttcgattggcaagacctcgatctcgacctcgctcgacggatcagagatttctattgcgatcagggatacctgccttccccacgaacttccgaggagaacctccgggaacaaatcttggtcgagtacgacttgcacagcgagaaacagatcaggaactttcaagcgtccatcgacctcgtctcggcgttcttcccgggaaccttgtgcgcgttcaccttgttccgggatcgaagggaacatcactacgccctctccggaccgagcgagatcaagcgcgcctttaaacgcgcaaagttcccggcaggtcagagcttgagcgggcattttcaagacgatcagttgttcctcgccgatctccaacaggattggaggttcttgcatcatccgctaagacgtctaggcatcaagagtttcctagggaggacggtcaagctcgaattggatctcgatccgatcccggggagctcgagctcggaagagcgtaaagtctccttagggataggcacgctcaacgtctactttgtccacggtaaagtcgatcacctcaccgaggaacaatcgaccgtgatgagacacgtgacgagcatgttacagacccaattgagagcgacgtgggaaggtcatcggaggagcagagaggcaaaggctaatacggccatcagcgggttcatcgatgacgccctcgcctcgcacgaccctacacggttggccagcacggaagccaagcaaaaggagaagaaggggaatttcgtccacctcgacaatctcgaaaaggaaaaggaagccacgacgaattcaaacgacccggcagggccgttgcaagaggaaccggggaaattggaggagatggcagggtcggcttgtaaacgcttggcaggcgcgttgagacagatcgacgggttgtgcatcgtcgacctcaggagcgttcaaccggtagtgagttcccggctgcatctcccccccagagacggctcgttcgcgacgtgggactgatatggtatacgtgaccgtacacgactagaatcgacacaaaccggacaagtattacgtcgatacggaatcgccctacccgaccaatagtttggcgcatttcaggtcgagcgacgacgtcgtgtttcccgattttcggcacgtcgatgccgccaggtccatctcgaaatacctcgagacatcgagcaggttgccgagcttttcgttcaaacggggagaatcggcatcgggcatggaggcttacttgccggaaaagacgatggcccacatcgccatgccattctttgtcccggacgatccgctctttatcatcatcgccacgtcgacccgaccgcactaccatttcgacgccagggataccaatattgtccgcacgatgggatccgtcctcagggcacaggcgctgcaggccaggatggtcgccgccgacgcgaccaagacggcgttcctctcgtcgatcagtcacgaattacgtacccccatgcacggcgtcttgacagggttgcaattggtacgcgaagccgtccggcggcaggaatgggatcagctcgggtccctcttgggcgtcgccgaatctagcggcaagacgttgcagcacctcttgaacgacgtgctcgactttggctcgatcggtaaaacggatcaaaaggccagcaggacggccgaggtcgatctggcaaaatcggccgatgagatggccatggcgtgttcgaccaggatgaccaacgatggcggtggggttgaattgatcgtcgagtatgaaaagcgaaattggaaagccttgatcgacgaggccgggtaccatcggttagtctgtgccgggtcgcccatggatgatgaccaccacgacgacgaccacgaagctgacccttgtccaacctgacccctcactcagcatcctcatcaacggtctatctaatgccatcaagtttaccaagacgggcagtatccggctcgtcctcaccaccgacgaggacctcggcaaggtcaccattcgcatcatcgataccggtatcgggatcaaggccaagtttgtgccgagaatctttgaaccgtttacgaaatccgactcgttcagccccggagccggtctcgggttgtacatcaccaagggtctcgtcgataggatgagcgggaccttggcgctcagtccaaacgctcagggaggaaccacattcgaggtcgtattgcccatcaaactgctcgcacccgaccacgatgtcgcggccaaggagacggtggccaagccgatcaaggggtggttgacccagcagcaggacgcggttccctcgacagagacaacggcgaccgcccagtcgtccaccgtcaactcgtccgaacccagcctgtcgctcgaggccacagacaaggtccgcgtgctcgtcgtcgatgacaatgacatcagtcggaaactgctcctcatggccctccgcaagagccctatcaaggtctcgacggcccaggcgaccaatggacaagaggccgtcgacaagtttcgcgatttccgacccgagctcgtcctcaccgacgtctcgatgcccgtgatggacggattgaccgcggcgggtcacatgcgtcaggtggaaaaggagttcgacacggtcgatgctaggtgcaggatctttgcgatcacgggattggggtcatcggacccacgcttgcaaaaggacgcgctcgagggcgaggcctcgttggacggttggttggtcaaggggcagcacggactagagatcatctacaagattgtcagggagacgggagagaagcgagaggagcatcgggcggcacatcgtgacgagggcgagcaacaagaggacacggtcgtcgccggggaagacgacgataccgccgagccaccggaacaaaatcaacccgagtcggaacagccctcaccaaagtagattccagaccttttggttcgacaagaggcattggcgccaatacacgacatcctccatcgctcagcgccggaacgcagcagcctcagtttcgactctcctgttcccttgtcccccagcccacgacgtccagttcttatatattccggtcacattttttgggttctattttgtatctgcagtgtcgataacgacaaaacgtgacgacgtaacaacaggggtcacacaatttcgcctcgagtatggcaacaatcactgtgcgggagtgctgatggcgaaagcaagaagcgtccggtagcgacggtagcgagcggacttagggagaggaactcgatatttcgcaatcttttttatggacgagtgcaaggacgttggaaagtccgacctgtttttgggcgttgaagctggcgccaaggtcaatcctctttccgaactctggccaatatccctgttgtacgatgtacccgtcaagctggatgcgcagcggtaccaccgagaacaagacttcggtgcaagtgtcgcgcgttaaaatcctgctcgagatggatgtcaaactgatctacccgggtgacgaccagcttcttactaccctgaactccgcagctttgaggacagtcttgcccaattgacaatcaagatcgacaatgcatttctcatgaatgatgaccacgattcctggcacaaaattgttctgcagcccgctcgcgctcatggctgtatttttcccgctcatatgacgctcgtgtcttattgataaacctcagtgaactgaggataatcaaattcgaaggagtccgccaccggatgctcttggcccgtcgagcccgccctcaaaatccgctgtttgaacagatccgctgctggaaccacttggtcctgggcagtggttgccgagaaggccttttcgaccgctcctgggcccattactgcgctctcagcgtcaatcgacgccagctgttcgggcgttatcttgtcgggatactctaggatgtcatcctgtgccaggacaggttcgggcgggggaagcgcttgctgggcttccactgctatctcagcgagcttctcggctggatttggccagaaacgcttcgaaagccttcatcaacttggtcatgttcagttctggtccaggtttgatcatcacctcgatccttccagagcactcactcggtcatgaatacatcctggtccaggatcacaaccgtgccgtggtccctctgttgggcttgttcaaatggcttgtggctcttcatctgttcgtcataggtacatcttgattcgggttgcaccatctcccaggttggccaacaattcgttatcgtgtgaaatgtctggggcaaagtaatagacgcaagagagtgcaggacaaagaacagcactgacccctttgaagtttctcgatcgcttcggtagggaaccttcgagggcccggcctactgccgttatcgacatatgtctgaggaggagggggagagtcctgcccaacttccttgtatctagcctctgctcttcggttagggacgtgctacccctttgctgatggctggaggaagaagacgaatggtccacctaccctgtcgagacctacactaactggtcactattgctgtcggatgctggtatttttcaatccggccaagcgagcagctctggaacaagaccttgttgtgaccaccttggctgggtatgctatgttattcgtcaagatcagaaatcaagcttgggccgccacaatctagatgcctggcacagtgatataagaagcttgttgaagatgagctcgtcgctggaatttgattatatcgactcatgtcgctcatagccttgtgccatcaaagaccgaataacggttcgatctctccgatatctgtcttgacctctacatggcatcattcctgtattcgttctcgcacgctgcttgcaacccttgccatgcgccttgaagagtcttgacgcgctccgagcgaattcctgtcgctatttcttgcagacccatactactcgggatgcttgagaatgagctatcatcaagtcgctactgtacagcgagtcactcgcacatccacatgtcaatcaagggcgttcgccttgttcccctagcgcagtaagtcaccctctcctttaaaccaccaaacaacgtgtccccggctttgaaattgactgttgcatgttcacagtcaaatcttcccaatatgctcgttgaccgtctgccatttctgttgtttgcaaactgcagagactgcaaagatcccgatctttgtttgccgacgggaccgcccttctcgttgaaaccaggcacgcgctacgtgggagacttggcgggaatcgttcaggacctgatcgatcgaggtgagtcatattcgcgatttctgactttttgtcgacatgacagacaccaatctcgttacaggctgcagcaatttcgtccatctactgacaggtgggcggaaagagttcaaaaaatatggcgggtctgtgaaagcttaggcaatggctgcgatcgacaagtatggtctctcgggagcaattctctacttttttctcggctaagagatggctcgaatatgctcaaagaggttagggaagagcggaaactcacgtgatttagcgacagagaccgcgacgacgttcaccttcttgtcgacgatagaagaacctcgcctgtaggatcacttgagggcgctgaagagtaggacaagctttctttcgacgtcgctccggtagctgggcccgtgaccgtccacggagctagaggttgacccagagattccaacgaccgaatcatacgattccccacctcgcgcacgctccgagctccacagtacaggactataatcagatccaggagacgtacaacgtcaatcacctgacaatccacgaccgggatcatcagcaatctggtcaccttcgagtgtatcggtcattgacctgattttcgaggctcacttactggcggacctttgaacctaccgaccagcctttagccaaagtcgtcgtcgctccccgtgccaaacgagccatcgctcgacgatgccagctacggaatccgtcaactcgggcggcacggggggctacgactcgatcacgagcagtcgatatgaattaccaccactatcgagctacatcgattcactcggcgcaccagccggcgtctttcaacagtcgcaaccgggtctcttgggcggactcatctaccgcaacagacactttacggacgacctgatccattcgttcaccgagaggtgcagatacaccgatttgggcgagatgacggccgtcacgtttgaaagggtacaggtactacagtctggacaggtctcgacgtacacgttcaccagccaagcgttgtcagaataccgatgcgtggtcatcacctcgcaactcacggggatcgaagctcaaccgtcgagcatctcgggcttgttacccggtaattcccacaacggacgattacccactccgccgaaacctaccacggtgcacaccccactccgacgacgcacccgagccggtcctcccgaattcgcacagagcaggaagacggccacaccccgtcataccccgaggaggttcttgtcgaccgaagagatcgagacgaacccttactggaaatcagaaaccgaacgtcaagcccagatagaacactatgaagcctttgtagccatcgattgggggaatcacgtcatgggtcccatgacaaggtggtccccccttttgaaaagctcggtagagtccgtgttggcctccccacaaccgactttattgatctggggaccgcattggacggccattttgtgagcgcgtttgaggagcaggtcgaagttcgtcgtttggcgcatagcgacgtggctgaccagatgcgaggttgtgcggttgatagcaatttggaatacgcgcgactcatgctcggaggatcttcagaggctctcgggtcggacatcagagtgacgtttgcgccggtaagttcgggccggttattgcctctcgtatcgaactttcgatcggggcaaagaaccggggctgatggcgatttgcgctcagtcgatggagagtctggcttcggtcctagacgaggcgatcgacggacatacgtatcatgcgccgacacggttcctggctctgcccaaggatggcaggatgtttggcaagtcccggctcgaccacgacatcgatccatacgtgacccacagactaatgaaccacgcgggtccccaaaatcagaatactggatgacgctcgattactttcccgtcagagagaccaacggcacgattgcgggggtcacctgcatcctcgccgaccagacggaacaggtcatcaacgcccgccgcataaggtccctgcacgaactcatcgttcaggtcaacggatcgcaaacgtcgaccgaggtgtgtcgcgcggccgcagcggccatgtgtaccaattcgagggatgtttcaagcgcgtacgtctacatggtcgaggtccccatcccagggctcgaggcagagggtgtacagcccgggtcgccctcgttggatctgatgaccaatcagggcaaggttcatcccatactggaaagggcatcggccgtgcccctgctcgaggtggaagatgggtactggcaatgcgatgcccgcggtcccccgaggtcctcctttcacgacgaagtagacgaggtcttgaggacgatgacggcgaggttcttgcccgacgggttcgcggaaacaagggcgtcggataacggagtcgtcgattcggtcattccacctgtggtcatagtgcgtacaaaagtctaggcgtcagcgagggcgtagtgactcaccctcggcgctggcggtgacgatcgccatagatccctctcagtcgcgaagacaatagactcggattggtcttgctcgtcctagaactcaatgtgagtcggcgggcttcgcgcttcgctcgcaagctgtctgacctcgcgtgtacgacgcttttacagccaatgctgccatacgatcaagcatatagtgagtttcgccgcaccatgacggtccacttcgatgtacgtctaaagcatctcgcgccgcagccgaatatatagataccatgggtaatgcccttagcgccagactcgccgccatccaatccgaagcggaacgccttcaagcactgcaagccagcgccgagagaaaggccagggaggggctcttgctgcagcgtaccgcagatgcagaacatcttcaacagcgacaggaatactttatcgacatgatctcgcacgaggtgagcgtcgactttggccagcgcgcggcgccggttgtcctccattgactgacaatttaattggctcagcttcgaaatcccctgggtgccatcgacttgacgctcgacaacgtgccccaacgtttgagagaattgatcacctataccccacatacggcacccgcacttagagagatcgtgcacgatattgaatgtctgaacatcaggtaaatgggcgttcggagacagagtctagtggaagcctgacactaaacacgattcgttctagctgcgctcacatgcggcgactcatcgacgacgttctgtctctctcaaagctcggtcagtcgttggtacaaggtttccgaggcgagatgatcaggactgacgtgacagcgaggacgttgcagatggtgacctcttgcaaatctcgccacgcctgtgccaacctattcagtgcatacgcgaggtgttattgacattccgagccgagtttgccgtcgaaggcatccactgcaacctgtccctcggtcagggctacgaatcgctggagattgacgaggccgtcatcgatcctgcccgaacacagcagattgtgagtcgcggctgattcttgcaaacgttgtgcacctagtctgaccgggcgtgcgacagatcatcaacctcttgagcaacgccatcaaatatacaggcgcaagtcaaccaccgcgaatagacattgtactcgacgccagcctcgaagcgccaagctggaacatcgcacatggatcgtgcaaatcgctcgaacaccttgagcaagagggccatcggcaactcttcttgactatcagtgtgaccgataccggtccaggcatggaggcgtcagcattgggtagactgttccaacgctttacacagatcgagccggtcttttcgatcaaggccgggggatcaggcttggtgagtcgtagagcgttaaggcctatgatttggaccgctcactgtcatttcatcgtagggactgttcatttgcaaacgcctgactactctgatgggaggtgagtttgacgaactcgccgattttgtttcgagaaacccgcctgatccgccacgttataggtgccatctgtgccgaatccgagccaggaaagggctcgacgttcaagttctttatcgaatgtcgccagcctatcaaacaaaaagaagtcgacgcggcaccggtcccggcaccgctcgtagagaatgagctacccaggaggatcggacttacccctcagcccctcaaggtagttgaagacggcccggccccagaaaccctccccaaattcgtattggtagtcgagtaagtcaaccctgccgtctttgtttagggttccacctgaccgctgccattaacagggacaacaagatcaatcagcgtttggtcgtcaagcagctgaagagggcagggtacatcgtcaccacgtaagagatcatggtcccaaccagcagactgcttcacgggcgtcttacacccatcgacttctttccgtttcagtgccgacgatggagtccaggccatcaagcaagtcagcaaatcgctatgggtggatcccaatggcgtcacgctcgattgcatcttgtgggtcctggtatggctctcgctaagcctaccgtgtactgatgaaacttgctcgaaggatggatgtggagatgccgaataaaggtactcaccagctctgacctctccatgaaccggaggcgcaagactgacaacaaccttgttccagatggtttggattgtactagagagttacgcgccatgcacaaatccggtgtcatgaacggtaagtcgagatggcactcaatgttctctaggcacatgtcctgataccttgctactgtcggtgcaggatgggctccgattataggcgtgtctgccaatgttcgagcaggacaagtagccaaggtgagcacgttcctgtttcggtactacgcgttactcgcacgtcctgatcaccacactctgtacaacagatgatggaaggcaagatggcgatcttgcgatcggtcgcataatccgagctgactccctcctgttttgcctttctttggcagccggaatggatggctttgttggcaagccattcaagattgccgagattattgacaagatgatcgaactcgcacccaaaaaaatcgtcacaacgccttggtagtggagcatgatctgcccgctatcccactgtatcccaatattcgccagtagccactagataccgaatttctgtatttattaagcatgtcgtgcagctcgaccaggatgcccggaaaatatagtatagacacgtaaatgacatatatctataaatttgttgaatatcaggcctgaccaggccaaatctcatctgcgatggctcgaaccagttcaagcttgttcttcatatcctctcgcgacaacgagttgccctgcaaacccatcacgaccaatttcagtctgaggccattctattacgaaaccctagactttcacactcacctcggcatgactggcgaatccacactgagggctgacgctcaactgcttcaatgcttcttctcgggtacacccttcccgacctttggccagatgatccgccgcagcgtagatccgatcgatcatctcccgcttatcttcgagctcggggaatttggacgtgacgacaccgaggacgacggtcttcccctcgggcaaaaaggccaggggttcgaaccctcccgcacggggcgtgtcgtattccaggtaaaaggtgtcggccgagagcgacgtgaagagggacttggcgatcttgtcatacgcgcccgaactgaaatgacgggatcccatataattaccccgacagagatgaatgccgaggtgcatatcagccgggcgctgtcgagacgcagagcacagtcgggcaaggtaagcaacagcgataacgtgggagggtcagcagagggagacttgccttgaaacactcgttgtaaaactcgaggtatcgatcgaattgctcgtccgaggttaaggtgttggaatcgtcctcggcccatcctttcaacatgtcctctgaacaaaagtctgtgcagggtcgtgtacaggttgtcagctggatagcacacgcttgccgaccgagaccgctgtcctgtctaggcgcaagactcacaagcgagattgggatcatcgacttgcacgttgcgaaccccggccgcatagagcatctcgagctccttttgataagccttggcgatatcggcgaaatacgcatcgtcatccgtatacacgccgggaagataggccttgccgggaccgtaccggagatggtaccaagacgggctaggtagcgtgagcttgatctctccccatcgagactcggggacgagggtctggaggtactcgaattcggggaggatggtggatcggccggaatgcgagacgggagcgacggcgagacagaccgcgttcgggatgtgtttctcctgaatgaacgtgttgacgtctatacgcggcggtgcggatgagcaaggatgatcagtgggttccaatgaagggtgtcaccgaaccataagctagaggtactgaccgggagcgtacatccgaaagatagacgtgtcgtaacccccctcacggagattcacttcctccatcccgacgagcgtctcgaaaaaggtaccccagaattggtgtcgggagtgttccccgttcgtcacggcacggaaaccgcattcgcgctgcaactcgacaatgtcgcgaatggacgactgttcgatcgactccaaggaagacggtgaggcttgcttgtcggcgatgaggtagcgttgacggatgagctgttcaggtcttagcaatgaaccgatgtgttcggccttgaaaggaggattgcttttgagttgaggcatggtggtacgtctgcttgaggaattcggacttggtatctgagcttaccaagctatgtcagagaccagctagatgtgtagttgaggatatagttgtactcatagcctactctcgctctcgatcgtcatcctcgtcatccgatcgttcgcgttcctgttccggagagtctcggagagtttacttctcgggggatctctcgggagattctttttggaaattccccgagggaatttagtcgccgaggtcaatatcatcgtgtttcacagtgaggggtaggagcaccgaagggctgtggctcatcctcatagtctcactacgattcaagtcgggtctctcgagatgaagatccacgtggtcgaggtcagagggtatagatcgtcgcagatgattgttcgacacagtcccgcatttctcccgtggtacacgatgtctgtcacacaggtgatctcccttgcatatgtcagccgtcaatcccgcttttgttcgaggcagaacccatcttgttttgactggtttcaacaagaacggttcagtcttgaacccctgagggaccacttgaagcataagtctgtctcggacaactaacaccccacaaaattcaagaagattgaagggattggagagggaaaaaagggttagcaacccctgacccctaaggcaagaaaaggtcactttccggaaccggaaaagatgtttgggcaggctgagatcgcaacccgatgacatgaatggcgagcatggtgatcaggaggaaccctcagctgctgtgtgctaggtacacggtcgtgctctacggtctacgggtacgaaaaggatgatttcctgatggagactcgatgggaataggttgtgcatcattgtgggtaatatcaatagcatcgtaattactgatacgcatcgaacatcactggcatcattcgtatgcgagggcgtaatatggaaaacgtgtatcaactcgaaattccgctgcatgcttcaagcccttcgagtcgctatgattaaaaccgcgtgttaccgccttgtcgcgattctcgccaaactgcccaacccggcccgactgatccgtctcaacgcccggatccctagagcgccgaccaccgtcgtcatcgtgaccaacccggcggtgacctggtagaacgccgtagggtcgtcctcgaaatggtttgtgagctggagacgttgagcccgtcagcatcgtcgtcgcttttgaccgaagcgaaccgacctacgttcatcccgaggagactcgcgccaaaggcacccaaggtcaggccgaccgtacatagcgacaacttaagatcgagtaggagtaatttattccgtgttgaagccaaggacaattcgacgacgtcttgattagatttgatccgggcctacttgcagcagctcggatcggatcagtcctgacgtctctcatgtcgagatgcattgatcggactgaccaacgcgcccgatactcctgtgatgatgccctcgaatcgctggctgtaattctcgagcaacagttcgagctcttcatgatccgaagtctttcttggcgttgcgcttgccttggccgtcaagtaggcggctgcaagatcagcgtctggagcgtcccagattgatatcgacagcgacgatcagattattgacgaatcggacagctcgagtgaccctacacggaccttcgcttaataaccgatcgatcgcccgtcgaatcccgatcgtcctcccgagacactctcccacagcgcctcgaagaccgagcaaccggttcaattcttcccgagtgatatcctcggccaggtcgtgtacgagcttgtccgtccgtgagacgaggagggccaattccgattcgaatatgttggcgagcgaggtcagcagggattccagggcgctacgacgcacggcgaggagagatgtggttcaccgaggtgagcgcctgcttgtccatttgatcgcagttatatcgcgacgaccatacgacgactcaccgatgctcgaacggatcgtggttatccttttctagcctacgctacgagccgggaagtgacgatcatcctcggtatcagccgattcgtctcgcaaatcgaacgccatcaggagacctcgcacgacaagcttacctcgagatgtcgtccaaagaccctatggagcacgtcttcctcgggcgtccccatcgcggtcaccggcccctgcttcaggtccgagctcgagtccacgtccaacctcgtggctgatcccggtgatggagagatagcagtctgaccctcttcagcgatcaatgtcgtcgtcacggtcgtcccaaccgtatttgtccgaggtacgggcgaaaataggagcacctggtggtccgtgaccagcgccttgacgtataacaagttgacctgtgatgccgccgacgtcgataacaggaccaggaggacagaggagagcggacacgaaaggcaacgaggaaagtttcagcggtgtatccggtcggaaacgatatatcgatgcaaaaagtagcgtgcaaagagggcatgaggcgaggaaaagggaaggcaaggcgtcaaatagcaaggcggatgctcacgaggatgaccctctgtagggggacgattgtagcctcggcgctggcgttggtagtatattgcccgatctggagagcttgtgccatgtcgatgatccctagatttcttggctgggtgcgggacggccatgcccggacagatgagcatgtaggaaaagtgcaggcaaggtgcaggtagaaaggaagtcagaaatggatatcgcgaacgtgagcgagaaagtagatgagaaactcacgtgaatctgatattgcgagcataattcggcttttgacaagctgttcgatgtgattgagagaggctgggatttcgtatacgagacgactaccctttcgaccaggtcgattgcgtaggtcgggcgatcagcacggtaaccggagagacgtccgacattttgaccttcccgactcacagctcaatcggcgggaacccttgtcgtcctcttcttgagcctggacggccgagattgtacgtaacatttccgagtcggtaaaggcgagctcatcttgaccttgccggagagggaggtggtctgggaacggtcgagaggtcgaggtcgagcgtcgaccggggatggccagtcgtgacaggcaccgtgttcgggaggtggacaagagcgtggtcgagagtggtaagagcgctctcattctaggtaatcgtgatgccagtgtccgtactcggtcgaggagctaggtgcaaaatgtcgacctttactaatcgaccaacaattatgacctagttgacctcggtcgccgtgaaatatggcaaagcttagcgcaagatttctgaaaaatgtcaatgtcgatatcgactcgtcgtctggtcgtctggtcgtcttgaacggatatagcgaatgcaagtcgcttttggtccaagtgtgaggttcttataattgcagtgagggtggatatcggtgtcagtgtgtacaagatgtggatatgtctcccggtgcacgtcgatcgatcgaagcaggtcagtgtgtgttggtcgatgatgacgtctcgacctgcaatatgagggaggatgatgacgatgacgacgacgacgatgagcagcaatcctggggtaagtgtatatatacataccattcaagcatacatccaaatcctagatcttgataacactataataccatcacacaaaagactctcaagctcaaccacacgcactcgaacgtatttcgtcaccgtcgaccccatcatgtccacatcccaacccggaccatacaaatcccccgtcatcaacccgatgatccaagtcgaccccgctcacacgggcaagacggtccgcaaagcctttttcctcgaaagcgtcctcaaccttttcaccctcccgctcatcttcgcaccccaacgcgtcctctcgtggatcgtcctcgaccccctcgtccgtatcaacccggctacggtactctttgcgagatgtttcggtggactcgtcgtaggcgccctcaccccggccctgtggctaggtctcccgcagacgaagacggccatagagagtagacgcacggtctacctcttgctcgcaggaggggagatcgcgttgatccccttgctcatcgatcaagcgatgaagggcggggacaccaaagcgggagcggcgattagcgtcaaggtcgcactgatggccattgcggggttgttgccaccgctcttgtggaggatgtacgtcttgctcgcaaggccggagatgttgggcaggtacaggaacatcaaggacgagcgggactagcatgtcatgatgggggtaaagcatgggtaaaggaaggaagacaaactcgagcgtttgatacgaggaggacttccccaaatagatcgatcggtcgaaagacggtgaccagcagtttggtacacgtcttggggcccagctcgggtactgtaaggtaatgacattgcaagtcagatgcgtcgtataatatgcctgcaatcaatcgatcccattagacccttcgctttgacgtcgacattcgatcggtgtcaggggatcgtggctcgtggtagtcggtcgcatcgtctcgcccgtcctcttccccggaccatcggccgacccgctcgatcgtctcgagtcctgtccatcacgagctcgtcatctcctgtcaggtatcgcacagcgtccagactcggccatggtcagggtagacacgaacagtcatattcgagtcagtcaggagtggaatcgatcattgtccgcctggacgtcgctaaagcatcaatgacggtacacaccgagctcgaaggcgcacgatacttgcatacgatgtcatggttcaccccagatctgatagacatatttaccgtgcgcttggttttgcaaggccgttgaacatctgttctccgtggcaagatattttcgaaatacctacatctgcgcttagcttgggccgtcggacgccagatatagagcgatcggagcggatagctaaagcccgtccctcgatacaaatcggtcaccatggcatcagggaggccatccccataaatgacatttgtcgacaaggttcctgccagagacctgacaagtcccaatcggcaagacctcttccatctcgagatcgccggtctctcgcgcttgctctcctttttcggaccattcctctggacgacatctcggttcttttcgacaccgtttttcttagtcctggctctgcaagagaagtggggatggagaccactgacatgatgaacatgcagtcctgtcgtcgattgcttccgtattttggccgtaggggcgatcaaggcagactgtaccatcaatcgcaaacatgtctacccgccgacatggtgcactcatacgcccaagtgggccgcctggactgactatctcaactcagtctgaagctgcggataccctacatatgtcattggtgagctagtcggaaaacctgcggatgcacactactgtatgcctaagacctcgatgaaaggcgagtgagtcctgttttgcggcaaggctgacgctacttggctgtgtgcgacctagagcgaagatcggttcccgaacacggggaagtagtttgaatttcatgtgatctacaatgatgtccaactcaagctggaacacgctttttgcaaggttaggggtcagaagccaatcgtgaacggtcgcgacgaatttgcaccgaaattcgaattgacgtccccaaaatcacaacggtcgtccgcttgaaaactactgcgcagtgatgatacgccgtccttcgacgtttcgctggatgagctgggcatatctcgcttgaaccgggcacaaccacgggacttttttcatcttcacttgtacaaccgagcgcggcaacggtcgcaggtaaactctaaatcgcgggtaggtttcaaacaccgttgtccacgttcacgctggccgcttaaacacctccgcctttccggtatcttcgatacccagtggacgggttgccatattccagtacgtcggcgaagtcggtgaatggtccaagcgagatcctactgtccacatgttgtcgatcgatgagggagcggaccttttctggaccgctgcaaaggtatatcatcttaccgaaactcgacaccgccggatttgcaagacgggacgtccacccaaatgctcaattttttcgagtgtttgttgtgactttttaccctttttccttgtctgaaagaacgttcttcctcccgcccaccgtgtgacttggcggaagaggtcaatgtccacctttcatgtgtggtgggaatgttatataaggatcagtgtttaggacgcaattcagcaaatcgtgtcagtgcaattgtctgcaaccaaccgattcaatccaaggcttgccactatgcgcttgatcacgtctacctttgccattgcccttacggctagcacgatcaccaccgatgtctccgctgcgcccgtcatcaatctgcctagcatcgtaggccagatcatcggtaacaccggcaagtcgatcgagtccatcttgaagtcggtcggcgtcaccgtcagtaccgacgccggtaagcacggaccttattggtcgttcaacgtcgatatcaagccaaaccggggcaatggatggaagcccaagaagcacgatgtcaattggagaaagccgttcagcgggtggaacacttacaaggccaacggtgtcaacttgggtgagtggcggcggactggtacaatttccgagactcagactaaatatttcctcgcgataacaacaccgctagggtcatggcttgaggtcgaacaaagtaacacccccggtgtcattcccgcccagtatcccgacgaatggacctactgtgcgaccgaaggcaaggctgtttgcggccccgttcttgagcgtcactactctacctggtacaccaccgctgacatcgacaagtttgccgcatacggtatcaacacattgaggatcccgacccattacgccgtctggctcgaagttcccggttctcagctatacaccggtaaccagaaacaacacttgaagaccattaccgactatgctatccgaaagggaatgcatgtggtcatcggcctacactcgttgccgggtggcgtcaattggctggatatcggagaggcgttcacccacctcgactggtggtataacgcgaccaatctggactactcccttcagaccatcgacaaggtactcgactttgtgcaagcctcgcccaatcccagtcaggtaggttgcgcctcatgtcgttctgttcccacaaaagatccctaaagctgagcacatccgggtctcatagttcaccatctcgcccatcaacgaaggatgcgacgacttttccaagtttgccaccccggagaccgtcagctatccgaacggagtcaactacatgaactcgtacctcaaagccgcttacgccaaaatccaaaagcgtaacaagaaaatctcgatgatggtcgccgacaactttatgggagccaagtactgggctcccttttggaacaagggcgacaatatcgtcttcgactcgcacttttgtgagcgctacccatgtgacttgccatcgccaggtattcaaaactgaacctcgaccctgttgcagactttttcgccgcggccggtgtctatgggaacctggtatccgaaatcacttgcggtcaagccgaggccgccaagaccgatttcccgatctttgtcggcgaattgtacgtcgtccacctgttcctctctctccgaatcgagacgtatcagctgagccgtttctctcgacaccagttcgcttcaatccaagttcaacaacagcttggccaatcgtcaagaggtctaccaatcccaagtctattcgtacgccactcatctcgccggtagcgcgttctggaatggcaagatgaccagccaggccaaggtcgacggcgagggcgtacagcaggattactggagtttcatggacctcatcgatgccggggtcatcaacccgggcggcgtcatcaacgcttcgtactgctaggacgtggattctgtataccttagatgcgtcttgggcgtgatatgtgacgatacatcgcatttctctctctctcgtgtgcggcctgtccccgaagtcactgcgttctttccgatcttctgtacctgaccatcgccacctaggccttgccggcgctcccaaacaagcgcatcatccgctcacacgatccggcaaacgcctccgtggccgcttcgatcgtgtcaggaagaggctcttcatcctggatccccttggcgaaccttgcgaggtagggttctcgtgcccacgagttgacgttgatctgcgtttggatcgcgtgcgggtcagggtgcaggtgggtcagtaccggggatgggtaaaaggtgggaaagaatcaccttgaccgtcccggcgtcgatacattctcggaagagagaatctgacagctgatcggtaccatggagacaaagctgtgatcgggaagcgagcgaaggtcagcccgatgcgaggtctcgtgcttgaaaagccgcgactcaccaagtaaccgctcttcgaggtgatcctgttcaactcgttcaagctgagaagaagatcgagtgaaaagcatcagagttccattcgacacgccacattccttcctgatcgccacggcaacgacgtacatgtccaacctgaacgcgggttctttgaggtacttgccatgcaggttgccgatactcggagccaagatgacggcccccgtttccttcatgaacctctccgcccttgtaggatccgtcaactgcgcgtcggtgatcgtcctcaacccggcttccccgccttccaatctgcccaattcgacctcgacgggcactcccgcacgcgtcgctcgctcgatatgaggtttgacctcggccatgttctcctcgtcggtatcggcatggctcgcatcgatcatgatcgaatcgaaagcggcaccttgttcggcgaaagtgagggccatgtcgatatcctcggcggtagtcgcgtggtccaggtggacggcgacgggtacgctggcttgagaggccatgtccaggacgaacttgaggaacggtttaccggcgtatcggagcgtggccgggaagaggaggatcatcgcgggggatcgagtcttttctgctgctcggatgaccgcgatggcagaagaggtatcgtagctgtcaaggtcgtgaagaagtagcgtgagcgaacacgatggtcgtccagctacgagcagagtgaacttacacgacctgggcgagaacggcatacttgccctccttggccatgttcaggatcgagattgacttgttttcgctccagtcggtcatgtcgtcaagtcgtttgattgctactgtctgttaatgagattggaatggaaagcaggcacgatcatgcacaaaatgaaacgactgttctaggcataggcatacaggttacaggtcaagcgttacgaggatcatcgtgtcacgccaagaggactcgttgatcgttgatgaatgaattgatcggagaataccggcgtacggaccggatttgcatccggagtgaccctgctggctatcggatggaaaatatgcttccgatcaagcttcagccggaagtaatgtgcttccgatgaccccggcgatcaagtcaccgatcgatggcggatgacaacaagctgtcatccgggtcacgacgagtggccagcaacaaggctcgtcgtgactacagatttccgattcttctggttggcaaagctccgatcgtgcttacgtcccactgggaagaggacatatctggacttccaaattgtgagcgcgttcacttggcgctccgttctcgctcggaccgacatgtccgaagtgataatcccagtttttgtttccgaaaaagcttccgcgcttgctccgccaactccgagtggatcgatccaggtcgacggtgggtcgaggatataacctcgagttgaatgtattattgtcaaggtccttgctgggcttcgcatgtcctcgcaagactcagtgccaatcaagtaatcgatccatctgtagcaatcatgcccgagctcgaaatcatctcccagaccgtaagtttcctgacgtgcaactctgacgtcccgactcaccgacctgacctcgtcaacgccgaacctagaactatgacgagatcctccaggccgtctcgtccaattcgaatgcctctgggttgctaatcaacgcacccctgagaccgtctcaaatcaaggcactcgtagccgctagcaagaaccccgtgagtctaaaccgtcatgtctctcgcggcagacggacgagccggctcatccctacgtcccgggcctcttgccgcaacagatcgtgcaccgtagccgcctcgtcgcttccctcactcccatcctcctctcaggcccgtctccagccctcgagcaagccgaatctcaggtcaaatccgaggttgggcaagatgcagaggttatcttggtcggacaagagacgttcttgggaagcgggatcaggttggtggaagaggttctatcgttggggaatacagccttgtccgtgtgagtccatcttgaacggctcaggatttgcggttcgtccgagcgaatagaagctcatcagtattggtcaacctggctgtggatgctggttgggaatacgcagcgaggctctggccttgggaaccaagacgggcatgagcacgaggatgatctatagtgcgatcaagagcgccttggggaattcatggtcagtcccctcgaagttcatcgatcaaatgtatatcgcgacactcgttaaattttcccgaaatcggttggtaggtcgtgggtcaacaggattccgaaaacgttggatgggaattacgaagggtccgaggaggacaatatcgacgctgccgtctcgatcttggtcagtcccttgcagctcatcatcaccggatcgatcgactgcacatttaagagctcatccgaacctatccatcgatcaacagacggactatgtcaaggaggccaaatcactcaaaatcgctgtccccctgctcgccctgattaggcaacactacattcactcatccgttcaaggacaaggagcggagagtaccgtggccatcatcaagagttatggagtgaatccggcagaaaaggggcaacaggcagaagacaaggaaaaggtccagccgggaggcaagtacgagggcaaggtcggattcgttgggctcggtagcatggggttcggaatggcttccagtgcgtgtctccgctgagcgtccgaaggtctcttgcgcgaggatcatagctgacgaacgtcgttcgtgggtttgttcagtcctgcacaaggccgcaatcgacgtcaccgggtacgacgtgtggaagggctcgtcagacaagtttgcggcagcgggcgccaagacggccgagacggccaaagaggcatgtagggatgccaaggtcgtcgtcttgatggtcgtcaacgccgaacaggccgaaggggtcttgttcgatggtggagtcgccgagggtaaggccctggtccgtcccgaatagtccgggaaagcacgcgtcctgacctggttcgatcccctacagtgatggcacagggaggcgcgatcctgttgacctcgactgtacctccctcggtggccaagtcgttgcaggaaaagctctcggccgtacgatccgacctatacctgctcgattgtcccgtctcggggggcgtcgcccgtgcggcattgggtgatctgacgttgctatgcagcggagatcctcaagggttgcaggccgcccgacctgtcctagaagccatgagcgggactgctggaaacgctggcaatctctgggtcatcccgggtggcgtcggtagcggctcggccgtcaagatggtccatcaagctttggctggtgagtaccagagttggaccaagacgatgatcaagtatggtcgtactgagaatgactgccgatcaggcacacaaatcaacatgatcaccgagagtatggcatttgccgcccgactcgggctgccccttcgtcttacacacaagctgctcatcaagtccattggattctgcggcgtcatcggacctcggggaaagaacatgctcgacggaaagctccagcccgattccacggtggatatctggctcaaggacttgagtattgtcagtgacgaggcgttggacttgggagtgccggtgtactattccacgcacgtgctgcagtcgtgtatcatggcatcgtcgtacggttggggtttgcaagatgattcaaggtcagtccatcgaataggggatcgcgctgttgaattggtactgatgatcgctctacacctagtctgacccggttgtgggagccggcgggtatcaaggtggccgttacagagtagtccgagcgtcgagcgggaaagatgaaaaacgcattgtaacgccaagcagaatcgaaatacgcatcgattctcgacatgctcatcaacgcgaattggcacaactcggtcgtcgattgatccggtcgagctgagcttgaagacgattcctaacaggcgcatgatctggcgcgagaaacggccggcttcagggaagtcatttggtcgatgtcttcagatggctcgcggttcgagccatccaaccgcattcgccgggtcgggagctgctttcagctcacaccccctttcctggactgacgcaggacagatcccgacgacttctctgggaagacatctcgattgcacgacttcgaccgttctcgcagggatatcatggaagtgaaagcccttcgtatgggccttggctcggaagacgatatgatacatcggcctggatctgcctttggctatacaaatcttattcgaccaggtgaactggttcaaacgacgattttcggatttgcttggaaagttttgtgtgggataaaggatccgaataggcgaattcgtcaaaagaagtgaggcatatcctatgctcagactaggtatcgtcgacttatctgccagggcgaagacctatacagaatcggaaaaatatacgtgtcgtaatgatcggtctctatcgctacattccaaattaggggtctcctcccgctctactccgtcgcacgtgttccacgagcttgttcaaagtctcatcgcacctcgatgatcctcaccgcctcgtccgctttcaacgcggtctcgatctcgcccgtcatctctctgacaatgtccaccccgatcgtgaccaccttcatcagctcgtccacgcccaatggagtgcctccggcttttgaaagcacacagagctctcgctgggcgttcaaggtgagggtgagcgtgcccgtcgacacttgggtctcctgatgggtcgggtcgagcaataggagatttctatcacgacatacatagaaacgtggttatgagtgttcgcgcaagaaaacagacggtatgactcgggcttacccttccaaatatgcaaacgtcacacaaagcggagtatggtgtatcgacaaaggtaccggcgctcgctcgtctgtagggtactgcgggtggtgagatagaatagtgtacttcaaccttgcccgtcctgtcttttagtgctgcgaaatgatttcgatccactcaccaccttccagataggtgcgagaccgttctcctgctcgacccgttctacttctggtcttcggaaatggcgcaacgccgtcattccggccagacatcctgcatcgatgaggttgccgtccgacgagagaaaatggaggtggagcttcacatgccagaccttgagtttgcggtagtacaattagaaaggtgctcggagatgaaaccgacgactagacgtcatccagggcctcagtccagctcactttctcgcccgcaaccacacagagtgcttctcgatcgaccgcttcactccgtcgaatcgccttttccatcagccgggtcaagatcacttcttcctccgttgttctgatattggtgcaaagggttagtcgctatccagagaatctcaataggtaatgaacgtcgattgagctcaccttccttctccgtgaaaagcttctccagccaggggcccgatctcgctcgtgatcgtcaataacccttcgaacggtcgatccgatcgaggattcgtcagggtcgccgagactcttgccagtactcttgtctttcccaaagagacttctactcgacccaaccccgatacgctcgtttcttctggatcagggaattggatgacgagtgatcttcgctcaagaggtttccgcccatccaggcggtagccctgctcaagagccgcctggacgaagctcttgttgatcgttggtactggaatatctcgaggcatcgtatggagactagtatgagcgcgctttgagctgtatagcgataaccctttggcatcgaaagattgttataaacgattcaagtattagcgttcgaggacctcgagatgttcagtagatctatcgagtcacgtgattttgtgagagtcgacagtcgcaatcgtggacatgccatatgtgtatttggtcctacaaccctcgtaaactaccgcaatcatccagtcacgttacagtcttgaggatgacaacgagtctcgctgatgattcctatcgaaaaatatgccccaaacccctgaatcacgtctgcttgcctgaacccatgtatcgcccggtgtattccctcaacttgctcatatccagcggcttttccaggaaatgatccgctcccgcctcgaaacagctcgcacgacattcctcgctgacattggcagtcagtgcgacgatgggaagtcgcccgtcaaatgtgcctttacgctcgagtttgcggatacgtttcgtcgcttcaaagccgtccatgacgggcatctgtcaggcggtcgatcgtgcgacgaggtcagtagcaggtcgatgccgcgtacagtgttcgactcacctgacagtccatcaagaccagtccgtaccgctctcggtttttggtgatcatatcgatcgcgatctgaccattcccggcggtatctaccgggtgcttcatcttggagatgagtttagctccaagcttttgattgacctgtcagcccgaaagatggacgcgttcagtcgagttcggttcacagagcactgtctcgttgcttacgatgttatcgtcgacgaggaggacgaccgagccaggagtcggtgctgttacagtcggtttggtcactttggcggggaggagcgcggccaccatcgattgtgtctcggcgaagcccacgagcgggggagattgaggtccagacgcaacagcatcgagcgccttgacgttaaacttggtctcgtcctttccaattccgtcaagatgcagcttgccagtagcatggccgttaaccttgggcgcccgatcagaagccttgattcggagccctccgcaggagtcggcggcatccgggttggacaagcaatgcaatacgtcctggatgacggccggccggggcatgcatacaatgtcgttcgatacagaggcaaagaggtccttgaactgcggatcctgggcggtggcgtgcacgttgtcgcatagcaagaacaacgtcgtcttgctcgataattccgcaggtcccgtgttgtcgatcactcggcggacgttttccagatcgatccataggtggtctacttcggtcactacaccgagcgcgtcttgctgaccgagagtgactacctcgagcccggcttcgagaaaagccttggaaaagatgctttccagctcgtcccgccgaagggccaggccgacccgtgggccagaatcgctgtgaggtcgattttccatcttgcgctcgcttaagggcgtctcaaagatcgtcggggcctcgttgatgatgcgcgatcctgaaggacccagtacggccgcctcgccctgcagcccgccctcgaatggtaataataagctgatctcggtcccccgatcttccggtccttgactgctccagatgcctagcctgcccttcattcggatggccagctggtggcagatggccagacccaaaccggtaccggcgtgactacgagtgtgcgacgtgtcggcttgtcggaatggcgcaaagacggcggcacgtaaatcgtcctggataccgatcccagtgtctcgcaccgaaatgaccagcttggggcgaccattgacagactccgggggctgtacctggagttttaccaggacgtacccctgcgacgtgaactttagggcattactatcgagaatatgatgccggtcagccgtggctccattccaaaagtgcatacgaagggcggcgagactcacttgatcaaattcatgatgacacgggtcaagtataccttgtcgccccagaccacggtaggtacgtctgcctcgatgtcgaggataacttcgaccttgggagtatggcccgcgccttgctggtggtgaatgggaaagagcttatccaaatccatgagcttgtccgcgctcgcccgacggaaatgcggagtcgaacatccccgggcgatgcccttggccaggtcgcggatgttgatggattcggatcgagccttggactcagcgtcgggttgttgcaacttggaaaagtcgagaacgtcgctggcggatcgaggaaacgatgagccctggcaatccagattgagcgcgatcgctccggcactcacgttgtgatcaaccggatactctcgcatccagccaggatgaacttgacacattccgtctgctcgctcgtgagagacgtcttgtcgagcaagtcggcgtagccagagatgacgtgcaagggggtctgtcgagcggaagcgctactgtcagccggggtcattcggacaaaacttgagactcactctgatctcgtgcgatgcaacggcgatgaattcggtcttctgcttgtcggcccggatggcagcttcgcgttcggccatgacgcgccacaaggtccgtttggtatgaatcgcagagaccagttcgtcccgactttgcgtgacagaacgggcgagcaagacgtatgaaagcatgcaggtgacgaatccaaccaggatcactgagatggcgagtccatgtggggtggccgattcgggaagggcatcgatgtcgaccatgggaggcgacgtgcccgggatgaatggaccgtgatattcaggtcccgccatgacataaaatgtagcggctaccatcccactccaatgcatagcctcgatcgcggccgagctgataagggcaaacaggatttgtcgccgaaagtccatcttagatagcggcactgcgcagtgcgagttcagaggtcagcgacgatggcccccgaacgaatacgatcagacaccgggaatcgcccgtggccgacaactcactgaatacaatggccaccactgaagcggcacacgcgattatccagctgatggcgacccacgtccagctccattcgacacctccctgtaatccctcgatcccatgagccaatctcatactcctcattccctcgtaatgcatggaaaaagcactcgatccgagcaaggtccctttgatcaaaaccttgcgcgtgattccagacttcaagtcgtccaggatctctcgccataacaacccgttcgacttggattcgttcatttgacgcatccgtagtgacatggccccgcccgcataggcttggacggccgcagttgaaatggtagggtcgttggcgatgctgttccccgtcgaggtgcgagacgtgatgcttagactgccatcgagcgtgtacccacgcgaggaagaaagagaaggcagagattccgtcgacgtgtttgaaaacgtcgtcgccaggctctcggaacggtacgatctggcatgatccctgtcgtctgtggtggatggcccgtcgtgcggtgagacgtattcgctggtcaggtgagatccctgccgagatccagcgttcgaattcggtttggacaagtcttcgtcgctgggattgaaccctgcccatgatcttcgatggacgttgccatccggctgagagtttccagtgaggttcagatggatcatggggtcgggaccgaccgatcggggggagaccatcccgctctccccgttccaccctgacggagccgtgaatgggcgaggcgccagagtgtcctgctgctgttgatgatcctctgatcccgtcttgtcggtctcgtcctcttcatcgtcatcatcgtcatgcaagtcggccgtagggtcgagcgtgatgttgatcttcggcgtcgggctgttgacggggaccatcgtctcgcctggtccacctcccatcaaccctcgtcgctcctccctcccccgcctggccagctctttttcttctccccgacgtcgcttgacttcttgtttcctctgccgacgacgttcgagcaagcgtttacggtagagaaagagctggatgaattcgtacccgaacgtcaaccacgtcgccgtgatcgcaaccacggcggagagaccggtcgagaaggggtcgtaatgaatgggcaagcccgagtccatggcgatcatggcgataaaatggaggcaccaaatcgagctacgacatacgagatataatccgcagagttggcgtgggtcagcttgggtcgagatctccggacgagtacgaccggaaaagctcaccatcctccgaaagttagcgaggccagggtgacccaaaagatcctcgcacggagactcttggtggtcaccacctgggtcataagttgagtggccgtgtagccaccgagagcagagacgaggtagctcgtgaggatcaaggtccagtcccattttatggacaagtagatcctccccgacgtcgtcgcgatggctcctcgaccgacgacgaccgaggttgacgtgacattgttggccagctgggagatgaccccagagaggatagggagatacatcccgagagatgatatccggtgcggatggttcgtaagatatggttgcgtagatcactcaaggtcgtcgtagcatgtcgtctgcgtggccgccattaggaaggggaacaaagttggtaccggcaagaggtcggtgtcgttggcgcccgctgcgtactgacaatcaatcgaaactcggtatccacttcagtgccatgtctttgctatcctgtcactgtgtcaggcaagatacgggctaagcgatggtgatgatggttcaagtttgtaactattttccatgtactgccctggtcgaggtcgtttggctcggtagcttttgcagatatgcacatggatgggacgggatctataaaaaagggggagacatgaccatgtcaaaacaacattatcagggcaatcccatttggtgtatatatcagttggcctgataacgacgacaaaggtctacatgagagtatggatggagtacttgtcgatgccattccgggtcgggaagatagctggtcaagaagtcgctctagtttgccaatctgatcgacccaagctacaaccgagactctattctcaagatgtcgaatcgggtcaatgggggtcaacccacaagtccaatcaatcaggattgacaaccttgtaccgtgaggggctggacgacaggcccaattgcttagaagaaagtgatggtagcggaacgaagacgattgtggctgggacgcacgaaaacaagaaggacacacctctacaggctctgcgcagatgatgctcgatttggtggtatatcgacattaccttggagaggccttggagagttgaaggagaagaccttggcgaccgggctacgaggtacagtccgaaatcgatctggatggagcctggctggatctctttgggtgcgacctggacagactttcgagagcctgtagacctgtacgtcgcggcggattcactactggtttgaacgggatgccaatacggacttgcaaaacttgaatcccgacctgaagaagagaacttcgaatggaattcatagtgaagagttggtgacccagtccatctagaccttctcgcaactttcgacacctttcgagaaccaataagcggcctttgcgaaaatcaagccgatgacgacgtcgttccatccgtcacttggccttcaaggtgattcaagacgtgaccgatcgcaatcgaagtcaagagtcgccgggaccagtcgaatatgtcctcgccccgaaattcaagaaaaggatttgatgtcctccgcctccggccgtcgatcacgcttccgaacggtattcacgaagcggtctctgtcaacaccgaagcgatccggtagccggtctgggaatgttccacgagtcggtgtagggcagataacattgccatccaagatcggcgaaacagcaattgatacgacctgtcatcctggcgatgcaagcaggacggtcgaggtctatcgcttgaagcggactaggtcgaggatcgaataggacgtccagcacttgagagcgaaaggacacagagccagcacgatccggattagatcgttgtgttagtaagctcagtatcaccacacttctaatgtcaatgaaagtcgtccggggcaagttctcggcgtccagactgcttgtgcacaagtttgcggcatcgcaggctgtttgaccgaatcatccgggttccaggttggggagtgcatgttcatacaagaatcacataggtctacatacggtggaacaccgcggtacaactcgcaacgtggagatgggggatacaggccttgtttctcgcaagaagtaaatgcatacgtgaaacgttaagggtcttcagagctgtcaaactgatgctgtcaaggatttcaaacgagttccgatggtaaccccttctgggccgagcattaccgatctaaacaagagcgaaggcggaacctgcgcctactcccagggcgacattgacccactttgaagggcttgcactgtcacaccggccggagcatgcatgtcaaaacccctgtccgcaaccactaaaccaatgaagaaaatccaattcgaactcacgatagcatgctcgaggaagtcttacgtaccgacagctcaagactgcgcgtccaggtccgattgtctgacgagtcctggacataagggatacttgtttatccgaaagcagagctcatcagcttgagcaagggcatttgcagatcagaactagtgcacgtacatggtccaattgccatagtctcggtcaggaaccgtccatcgaatcgtggtgttggtggtgtttacagcgacggtatggttctgcgcagcggatcgggatgaggaaagcctttcaccgatcgagattgctgacaccgatgctcacctcccaatactcgcgcaattgaagggcatcgggtctgccgtatgggaaaggtccgtatcgttgactaaaagaagtccaaccccaaaggtcagatgttgcccctggatcccgcaagttcgaccgacgcactgaatgtcgaagttaaaaggcggagtccccgtgatattccattcggcgaccgcgccgggctcgagcagcaggtcagcgtctgcctgtcgagatgagcagaaatccgatttcaagaaactcttcgtctagttctttcgggtactgtggcactgaccactatgttcccgatggcctggcaaccagaggctacggctagaccggcgatgaacgtcttgattgaggtgccgagaagcatattgtgacgtcaaatacctttgccacgacaggcgctgcagtgcctcgtttcgattcgatagggcgatcttgcaccgaggcatatatgccgaatacctcaacggtataaacactatattcacaatgtgtactctaccctatgacgaagacccatggctccagctcgggctcggataattggcgatgatacctactgctgttatcacaacgcatcgcgtgggtcgcttttcaggcacgacatgacgaaacgccaagagaccggaagctgctccggctttgattgcccatgcttcaactgaaccacgtcgaccggtcgacatgaccgagttcgacccaaggtcccggtccgggcccgaatccagcatcagttcccgctaaacaagtctacatcaccactgtcaaaatacaaccagataaaatggcaacgcgatcagatgactgcaaacacggtccccgcagcgatacccattgcgatcacggcgaatttggccggcgccagactattcgacatgaagggggcagattcagaattaggggtagcaaatactctgaaaaatcttaccatacgactcacgaggaactgcccgacgtctcgacgattctctcttccagcccgttgtgccaggtagcatcgtcagacgagtcttgtacgtatggcatactaagcgatccatggtgaaaaggatgcaatcagtcttcatcttcaaggttggtgcgatatagtttcaagcgacttgcatggtccagttgccataactccggttggggatggtccatcggatagtcgtattggtcgtgcccaccgcgaccgtgttgttctgggcaatagccgaagtcagtaccgccgcgatgtcccgccaggaattcgcttgtgaagaacctcccatagatatcgcgtcctcaggtcgccactaggtccaatgggtccataacgctgaccacgagggagcaagaggttgatcaccttgaagcgtcagcgttaggatagcgtgcgtaaactcactggacctcgaacttgaacggaggagttcccgttacattccactcggcgacagaaccggctcgaagtgaatcgatccgggtgctctgtgatcgtgattttgataatcgatcagaccgttgttcaagcttacgattgatcagtccgaccgacctgctgaatctctcccacggcctcgcatccgctgaatgtggcgagaccggcgacaagagttgaaacgatcgagccgaagagcatgtttacgcgcctgagtgtgagggtcgtcgaactgatcacaagcaattcatctcctgattgtgcaacccgttgttgttctgatatcggcggtatatacgtatatacatatgtaacgatatacgccggggcggctcggcgtttcccttccggacaaagtcgctagcatcgccttttacctgccctgagcgccaaggccggagggaattcggttgttgtttgacgccaccccgtacccagtggcgatccagcgtcgcagtgttcacacggaacgatatttggcattcctggtaaactctaagttctccgtgtagcttcggccaatcatgaagagtgaatccagcccgaagatatcctcctttggccgcggtatgaagcccggggtgtcgggacagtctgcggggtcatagtctcgtcaggggtttcatcggaaaatgcaacttgaacgctaccaggcatcactcgtgccggtgacccagcagagcttgcctcctagagttgacatcgattcggaatcgatatacatggttcatggcgagaaatgaggattcaggtgaactgagacctcgacacgatatcgtgtaggccttgatcgaacctggatccaatgaggcgtaccgtttacataggggtgatgtcatgggtcaacgacgaaaggcctttatccccactttaaaggatgcatgatgtcgtaagcctgatgagctactcaaagcgtcatcaaaggggttgatggacgcctatcctcgctcgttggtatatatattgagcgatgtagccttcctgtctaatcaagtcgaactggacctcgagtaatctccgctgtcaccatcgaaacaacatacctccccaccacaatgtccttccagaagtccaacacccaagtcggtcagtcactcgacgtcctgcttgaccgatcaagattgacgatcgtcacgactgacatcccctttcccgacagtcaaggagactctccagcccgactcgaccaagtccgactctgccgttgtgggtcagaccatcaccggcaagatgtccgagtgagtggcaacctaacccctaagagcccgagcggcatctgacgtgtcacttgccactgtagcgccgcctcgagcacccgacaggggcccggcgagcaactcaaatcgcaagtcgaacctcagtccagcaagaccatcgggcaaaaggcgtcggatgtgggtgacagtctcgccagcgccgtgaccccggagagcaacaagaccaccggtcaaaggctgactgattccgccaacccggacaagtacgggaccactctcggcaacgaccatcacggcaatgtcgagaccacctcgcagaagccgtgagtcctcgaggtcgctgcgacacgccgggcatagtgctaaaacttgtcattggttcgcagtggactcgttcagcaggtcaaggaagccgtcaacaatgtcttgggaaccagcaagtagaagttggaaacttccgtaccctagacacctttgcgtggctgtcaagtctgtcccacctgagcccattgatcgtgtttgtactttgcgcatcaccaagctcgactgttccgtcccgtgtactcgagtcttaacaagtagtatcgctgtgtcattcgtcgcagagggcagtgatctcgatgaccaagctctacgcttgctgaatcgcccaagaacgaccgacatccttctacggtgtactaggcgctcgcatcgcgttgcacgaactgaggctttgtcgatttcctggacatttcgtgatgatgaatgatagtcaagcgaggcaattccacgcagaatcagtgacgctttccgaatcccgtcgtcccttgttccgtttggcgggtatatctcgagagtcgatttgctaaaggagcgtgcttgtttccataagtatcatcgcactggagcgatgtcccaaacgaaaatccaaccagtggctcctggtgatcggtgaatctgtgacagcggtggcccgttgcgatcgtcacaagtcagagatcatgcgcgggcctggtcccccttgcgttcggtgtgtagtcaaattgtgggtctgcttgacctattgatgcttagttgcgtcattcctagtagcaggttttgaaacagagaatgtcaacggacaagacatggctcgaagaagtccgtttgcaatacagttcgttgctggtccgaaggtaacgcgatgattcgataagcatacagagttcatacaggtgtcccagctcccactcttcgtggcacatcccgacggtccaggtcatttcgtcacctccatcctgtcaagccggttacaaccctgctctcgtgggcgagaccttgaagacccgccaaaactctcgactgtcgtagcaccttgccaaaagatcgttgctcctcggcagcgctttgacgcgatcatctttttccatcaattcgaacacccatcgactctgttgactcggctcgagcggcatcgtgtcgtcctcgtctggtttcgacgccgggtgtgaccatcgtgcaaagagggaccaccagtcgtatacgaaaccatcggtgacgagccatcgttgaccggcacactggctctcgctccatccttcgaacacggccacgatcgcaatggcgacgtcttccccgtggacgaggtggagactcgtcttgtcacggacctgatcctttgtcttgcccacacgatcgatccagttgcggggatgtcgctgaccaccccacaggcccgagaggttcagcacgcacccgccgagagccaatagctcgtcctcggcgatagcacggggcttctccttgtcatagttcgagtgacggtcgatccagagaggttggtcggggatttgatagatgccggacgaaccgagttgcatgaaccggactttgccgtcgagacgaggatgcgttgcgatgtaggacgagatcaggcggtgggccgaacccttgtcggtcagcgggaacacgatgacaatgttctgtgccgagggaagaatggaaaagtatgatgggtctgtttgggcagggtcatacttccactcgatcgtatcgtcacgaccggtcgtcgaggtgctcgcgtaggacaagtttctggctcgcagaagcggcaagagaaaggtcgacgtccagccggcgccgagtacgaggtagtcgagttgatgcatggtatcgaggctatcgtctgagttactaagcatgggtgcgaagggtactagtgtgggttcaaaggtcgatagagaaagtcattgaaaggacgggcatgataacgacgtcgagtcgctcgaaccgtaccggcctcgatcggatggcgcgggggattgcaaagaagcaaagtgatagcgatatagaccggtacaactctggcagcgatcaccttcagcgaaagatatgaatgacactgcgatatcaggtcggaagtcgagacacatgctcatcgtcttgagcatagtttgagatgatacctgacgtgacacggttcagacatgacgagctggagattcgaatcgactctccaggtcgtcttttcgcgggtcactcgcttaggctggaccgccccgctctagggtgaggttttggtcttgtccacctttgagcctcatgcttgcctgcgaatagggctgtcatccatcaccacttgtggaaaggtggacgatttcagagacgtccccgctcttcgatctggttgacgtaagattattcggtcggaaagctagcatacacattccgagtccctctcgatcatccgtccagcccgcatacggaatcactcacggccaactttatctcctctgacgctctggtcgctggcccatcaacatcgagtgcgatctcatgaggatcgggatcggctcgtctagatctcggactattagttgtcgtcccgggcgactgctgcttgctcacaggcgatacgggacccggccggcttttgaaaatgatttcatctcggaaccgaagcactcccgcgcataatggaaagggatcgtctggacatttgaggtttgtcaattaaatggacccgtccgatatggaccatcgcatcacaggccacgagggacgggaggtcagggcacagagtttcaaggagattacgtcggaacggacaggcaaggcgggcaatcgtcaggttagtcctgagcgatggcataggcagacattccgtgtggcggacacggctcagggtttcgccggaaccagagctggtcgccgctttgacctaaagcgagggtaatgactggaggggcattcttggtgggttgcgggacgggacatggatcgcttcttctctcgctagcttcccgatatgctcgaccgccctcacccaacgcctgccctcctcggccacgatcatgccgttcaaacccagacgcaggtttaagcgcactatcggatgagaaccgtggatgttcgaagcgagatctcaccactctcacaagctcagcatcctcgatcattccagcgtcttcccgtgggtcttcccgcacagaaatccaccaggagtgactcgcaatgacaagcgcgacgtacagcttggtttgggaggatcgtaggtctcccgaaacacgggtagacccaggaacagcacacatcacgggcagatttctacatgcgcggtcatgggatgcttatctgtcgaagcgtcgatctttgcttacccattgtgagttatctcttggtcttcagctcattcggtacgtcctgttaatgtaagcgatgggatttgattgtccagtctagaatagaacacgggctgccttcgaagtgggaaggaggaggaggggtggacttgtagttttccgtgggatctggctcgaacgcgatcggcggccttcagatgtcgagctctcctatataacggcccgtatcgttttgatgacgatctcgctggccttcgaaagaacatgtcttggaaaataaggtatctctgaaacttgaccgcgcttcaccgagacgtttgcatcgctacgaaacatgctagcgcgcctcttgacatactactactttgcatcggcactgtcattttttggctcagtctcagcagcaagagatatgacggcagatgcttgccaatgcctcgctagcataaagttgcctggtttcacgacctcgttctacgtaggtgcatgctcgattcttcgcaactcatctaagctgacaaacattgtgctcctgtagtatggtaccggaggagcagaaaatctcgttcctctcaatctgacgtacaacgctggccgtaagccctggcaagattgcttgcgctctcgatatcgtctgctcatctagcgtcttgccgtgtcttagtatgtagcggcatcaatttccacgctcgactccagtttaccagcgacactggcaacaacggcaacgttggatgtttgacggatggcactggtggcgcgacgtcgttccaacctggaacatcgaccaagaacgaggatgtcgtgttcagaaataccacaggcaatttctgcgacattaaggggggcaagctatgctccctgatcaattcagtgcgcaagggcaagtcggaccttttgacagatgcctcaggtgtcaccatcaaagctgatactataatcgcatagcctacatcgagttgtcagcagacggatgcagcacgaccggcaccgtcaaaggcaatggcaacagcaattacgacaagctgctcatcaattcgccgtttataaattgccccgcggatcctaccgtgtccaagtcgacgactttgcgaaagcggctcgaggtggttcatggtgtcaaaccagtcaacctccgatgtcgatcggggtatcacgcctgcaggactggcgcgaagcgatgggagtgtttgcagatcgacgatttggattcatgtggcggatgtaagttgtcgacgtgtttcttcttcgatttgcaagtccctgactgacgccgtgtcatgtggccaggccccggcaccccggaagctcgagactgtaccgagattccttccatatccgccgttcaatgcgtcaatagtagctgtcgaggtgagcaagtcggcgagtcgtcacatgtgaacagagatctctgatacccgtgttccatcccgtttcagtctacaagtgtacgcatggatacaagttggttgataacgcttgtgtggcggacacgactgcgcgttcgctttcctattcatggatttgaggggcttcaaggtgactctgttgtattacgacgagatcgttgcagagctgagctggtcgttttgagctattgcgggtatacacttgtgtggcgaattggtggctcgaaagtacagttcgaggcttgaacgtcgtgtgcttcagggctgtgactgaatggggtcgaatcacagtgcgctccaccagtcgctctggggaggagcaagtctgacgaagttaggggttaggggttaggggttagggcttttcgcctagccacagtgatccctcccgaatcacataccaggagatccatagccaccaatacaatacctctcagacaatcaggacgtaacgaccatgtgtatcagctgcgaaaattaagacagtactcataataattgatagtcgtcagtcgatcgcgacccatatcccatcgccgggcccgaagacaagcctaggtcatttcgcaagccagcaggtgcacgacaatctgaacggcaggcggacgaaattctgaaaaggatctccgattctgagatcgactctttggggttacaattccctgcgtctcttcccgcggacgattatcgccagtctggatcgccggctcgccttttcaccacgcctcgatcatcaagcccggcctggcttaccctaaaaatcacctctgatacagagaatccatccaaaaggtaaagcaggcgtactcatacggtacagttgatatcgtggcaaactccgcaataaagactaaagtcgcttgccttgaacacaccggcctgcctacacaggtttgccaagggtagctcacatagctcgtccgagaaatcgtgcttgtcgaggtacttttttcgatcgtttccccaacgacatgacggcaagagtcgaaaagcctagatcggcaaccgcttcatcgataaatcctcccggatcatcgccgacagcatgcgcctcgggctctcactcgagtggttcgagtacacctggcctacggctcaaccttggcgaccttgagcccaatcatattcgaccgcatcaccacaaaaggcagctgtctgcaacaggaacagggtttccctatgcaggacccagccctcccttgaacgaagctacatctgcatcagagaaggctacagaagttcgggtcaaaggagcgaatgatggggctaagcaggatgaaaaggcgaacccgccgcagggccaacgagggatcgcgaacaggtcacctacgcaagctaagacgtcccgctatcgccctggcatgacccactctacctcttctccccagctcacctcgacccgccatctcgcggactacctcgaggacagctacaactcgacaatacctcctcctagcgatgctcgtaaacatcgccatcaagcaccaccaaccatctcggttggctccgcgccctctccatcgcgatcggtgtccagtagtagtggcggcgttctcgtgtcgactgtcagggaccgagcgaataggggtcaggcggcaagaggacccgcccggagcgacagtctgaatgatctcaaagggggtactgaggggatgggcagcgatcctgacgccgcacagtggaattgccctttcgaggagagcgcgttggatgacgattacaaggatctcgataacaggtaggtgctttcggttcgatataaggaggattcatctcatcacatactgatacgacttgctgcaccgctcggtcagtgctcgatactatcatcgcaacccttactcgaaatcggcctcaacatccccgatcagagatcccagcctgctgcttcctgatggtcctaaaagcaagagtttcggcccggttggaagcctgctcgctagacggagaccatcagactcgtcaaatcccctagcaaaagggagcctagacgtgacatctactacgccctcgcaatcggacgtgctccgcagcccggctcattcgccgaccagctttttgaagggcacggacataaatgcgaacggacgtctcgtaatattgacaccgacgactcaggagtggcgggaactaggtttcgaaaaccttcgggctctaggtggacaggggtcggcgttggacagtgagggggaccgcgaacgaaagacgagctgggaatcgggggacagcgacctcagtcctgatggctatgagtggacgggagcacccaggagacctcagttcaagacgacgagatcagcagacccgctcgagccgacgggtaacgacgcagatgcttcaggatcatcagcaacaaatgctctggggttcgaacccgcagatcaggatcaggaccaacccgttattctgacagtaccggcccagacatccggcactacaagcatccttcgaggaggttcttcgcgagcatcttctagacgaaattcgctaccagatgtgcctcaatctgcccctccactactagaagagggcgatctctttgctcgactaatcggtatgcaggtcgaagatcggcagaggaaccatacgtcggagaacaacggcgacgacacggatggaaccgcgggcgtcgtaggaggatcggcaccgctgtctgagaccttggaggcgggagaaaatgcccctatcaccatcagccggagtcagagcatgaaggaacctggagaagggccaaagagaaaggagaaggaacgagaacggttgtttcgcctggttggcgaggatgttgagaagaacggcattcaaaagcccattggaggttggggcattaagcagatcggcactcgaggaggactgtcggcgttgtctagtcctggaaacccggccccggatacacctgaaatcaccaagacaaaaaccgatcatcggccttccatcgtagaaagccgctcagagtcagccccggttgtagacgcaccacgtaggcgcgtggaaggcctgcatccggaaggaaagcccaagccagctccacctaatcgattagtctcaactgtctcctcgataggcggcctatccatgacatcaacaaagcccgtcgcccatccctcgccgcttcactctgtcacgagttctatacctaacatcgtatccccaggcgaggaagcccctgccagcaattctgggcaatcaactcgatcgcagagtagggctcattcgagatcgccaaccaagacaatgtcatcgccagagtccaagactgcctctgcccaggttgaaccggtcagccccatcacctcgcgccgacggcaatcccagcgcctttcgtcgctagctgggcgagcatcccagccgttcgcttttccagctgccttgcctccatcgcacccgaccaatcgaaagcctgccacaggattattgagcgccttctccccgtttacatcgaccaacggatcaagcagcaagggcgaatctaggccatcaatctcacgtgaaccgactgctcagcctctactctcgatacctcactatcttcagacagccgaccggtcggattcgatgatctcgattgcgccaagcacaagagcacctagtgagccagcaacacctttgggggagacagcaggaggtatgggtggacacggaatcgatgactatgtcatagtcagcgaggcaggcaagggagcatacggactcgtgaagagggcccggcagaagggttgggatggagagccgatgggggatgaagtgatcatcaagtatatcatcaagagccggatcttggctgattgttggaagaagtgagcctaggcgggcatgacttcctccttatcgtagctgatccgcagaacatttttcgcacctgacaggcacaaagtgctcggtcctatccctatcgaaagtgagcccgaagacacgagtgacatactgcgacaggatacttatacgcgactccgcagtccatgtcatggaccagctcaggaatgtgccattcaagcgtccgcctcaggcttacccatgggatccacttcgaggccagtcgcagccttccaagatcgtcgaggacgactactttagctcgactagcaataccgccacacccaactcggataccggggagacgacacccacggcgaggactggggccatgccgggttcatccgtcgtaatcctgtcgccagaaacacagccgttgaccgagggcaacctgtctagcctggtaggtggagatgtgaacccgctcgaatggcacgccaagattagcgcagagacggtgaagaatcgtggacaccccaatatttgcaaaatgctcgatttcttcgaagaccgagaattttactatcgtgagtgatcgtcccgaccgttggttcgccgagtactgatcagggatggctcgtgtatcagttgtcatgccgcgattcggagtcggtctcgacctgtttgaccgcgtagagagcgctccagacggtcttcccgcgttcgagatccgttctttgctcggtcaactctccgacgccttgcggttcctgcatgccaacggagtggtacatcgtgatatcaaggacgagaacgttgtactcgatggggaaggacattgccagctgatcgattttggcagtgcggctcattggcgtcccggcaggaaatgggatacgttttcgggtactctggattacgcctcgcccgaaatcctgcgcggcgagatgtattccggcaaggagcaagacgtgtgggccctgggagtcgtcggctacgtcttgatctgcggcgagacgcctttcctcagcgcagacgaggctcaagccggtctcggcgtggacaccaaaccttacgcggccttgatgcgacgttgcagtggaccgaggggtcaagagggactcgaagcggacggagggggcaagatgaagcacgcgtacgactttgtgcagaggtgcctggagatgaaaccggaagatcgtccaccggcggaagcgttggtcaagcatcgattcgttctcggtaacggtggttgggtcgggcaccggaactggattcaggaaggacaggcatgagtaccgatgttccggggaacccatagcgaatgtagaataccgtcagcttatgtaaaaacgagactacaggcacagggaaatccaccaggtgatgttgagaatgtagatgccgatatgatatcctcgccattgccgcataatcaacacagtcagctgatcagccgaagctcgtgcgggtgtgaaatgtataaccggggattgggtgacgtgtgtcccctgactttaaaagatgagcgggatgtggagaccccgcaatccccgagggtggtccactcattacgtggtttccatgcgtcgcctacgtcgatcagcggccgtcgaaatttcgtagaaagccctgatgaagctattttcgggattaggtcagctagctagcctgaatcgattgctggactacattatcaatcaaggggaagtctgccagatcatgttgaacatagttggcgaagcagcgcagcgataaagatataaacctatggcaagctggatcagccgagacgacattcgctcataattcaagctttctcgtccgctccctgtctcaacctccgcgccaaactcgccggaaactagcgaacatccccttcctaccatcaacggctcttgctccaaaatgggcggttttgatcatttgaaagtcggccaagtagcgcaagggtgtgagtgaaagatgttcgggatcgtccggaaggggactatacgctgatcgaatgtgggttctaccggcaacgtgacagactggggagaacacacgagtgagtatctcttcccctcagccttgcgaagacaaggagacttaaagtcgattttctttctgttgctataggtagtatcgactggtatgtcgccacagttgcaatacctcgggctcgaaacggcgaaatgacgaccaattcctgcgaacaggtgtgaagacaactatgcctacagcatttacatcgcagagtttatcaacaccctctccaacatccccttcatggctctaggactctacggatactatcaagtcctgaatcaaggccttcccactcgatatggctaccttatgctcgggttgtcgttgatcggattgggctccttcgggtttcacatgacggtgaggatatgaggtcgtttccgtcggaggctgcacttacatctactggatgctcgtgctggtgcgattgatctcagctccaatgggcatggcaattgatggacgagttacccatggtgagtctcggtcggatgcaccttgagcagagtttgagactgaaagagctaaagcacctttccagatctatttggtcacatattgcgctctactggtcttcgacaccagaccagagtttgacatgaggtggggtggagtcggaatctttgcaatgctagctttggacctgttcgtcaccgtgagctagtgagtaaaatcagattcactgccctgtcatgatcggcatatgctaagactcgacctcataccgtcttctactagcatcatcgccccgaacccgatgtatcaccagatcgcatttggatccatccagctctttgcaatcgcgaggatcatttacctcatcaaataccgcttaccgcccagttctcaacacccggccaagaagacgatctccaacctcatcatccgaggtgtggcgctctttgtcgccgcctttgtggtctggaacctggacaacatcttttgcgacatgtggagagatctccgcgaaaaggtcgcgccattcggtttcctgatcgaaggacacggtaagtcaatctcgagaaccgagtacaagattcgacacactctgactatgcgttactttgtcagcattctggcacctcgggaccggcttgggatcttattggatcatgacagctgccacctgtaagccgagtacggcctgtgtctcgggaatcatacactgacctcagaaatctgcagacctgtgcctttgcgtcaagaccggtgtcaaggcatacgagatccgaggcagttacatgttcccttacgtcgcaccgaccggtcagtctccgaccagtgacaaaaccgagccccgcctccaaatgtcggaaaagaccccgattctgaaggctcagccctgaaatgcgatcataaagctggaatatacaaaccaggtcacgaggaatcgagacctgctctacatgaatcgccgtcttcgtagatgtcaatcataatcacacattcataatgatgcggtcgttagctcgtttcccggtctcgtatcgtaaagatttcatcatcaacgaccttgttggtcgggggtcacaccagtatcatttggtgccttcgttctgctcgtcgttctgcggtgtcgttctccgtctgactgatcgcgaggtctgctcccaaccactgccgcgaacttgccatcctgttctgcccagtggatgttactaccagcaggcagctgtcagtatatgtctcgagccactgaggagtcgaatgaacccacctaaggtgatttcgtgagattttacgcttgtgcttttgatggtcagatcgctccgccttcggcgcaagtgcagaagtcgtccgtcgcacaaccacgggtctaggcgtgaactctttgacagatcccggcggcgatctcggattacgggcaggagctggagcgatctctttcgcgagctatgatgagcaagtcgagttagttccgatctttggacttaacatgcgccgcgaccttacctgtctgactagaaccgcttcgtcttgacggccaagttctcgtatgattgcggacagaccatgcttcgaaattagatcctgatgctgagggtgctggtcgcatgtaactttgatgatccgcagaagattgagcttggtaagtgcctttgccttcttggtcagtccttcgcctatcttcttgaacagatccgctccggccaaagcgagggtcaacaatggtgacgctctgagaagacggaggaatctgtgattggtcggagattagctgtctgagtttgcgtcacaccatgagcctactcacggttccagtactccctcgaaggccgccccgttagcgtcaagaaaagccgatctgagcgcttgcagcggttgtggcttcgaaagctcgtcttccacccttgcagtctcatcttgcagcctggcgaagcagtatacaaattgttggctgtgagtacatatttacacaggctctagtcgaactggcacccaccagaagacaatggcttccagacccgcgatctatattttactaattagaaatatgcttctgacggtcttcgcaccagacccaccttccagtatgcatccgataacaaatccaagtaaactggacagagacaccaatttgattagctctcggacttccctcgcgacacgaaattctagacaaactttgtacgccaccatacttccacaattgtcgccgggccgtctttccagcattgaccatatcgcaaagaattggtagggcgaactccttcaaaggtgatttcatcgacaaagccctttgcaagataggtatgatgccattgactgccgcttcttcctgtcggatgcgactcagacgacaaaggttgaacagcgtttgaaaaatatgtgagcagatctcctgtgagcggccaaaaagaggtaagcttgtgttgcgaatataacgatcgtttgtcccacatttgttcccgttcgcgcaaggtggtcgtccaagactttgatgagaacagcaattgcatcggcgttctggagcacgtcgagtaatgaggggctggttgacagatgcttaatggccttcagaacaatcgtcagacacgacgacgtcaaagtaccgcacgctcgaaggagtcctgggcaggagcagtatgcagatcagtgccgacaagcgtcacatagcgaatgccttgagcttacgcttgatgaaactcctcgtgcccagagcgtcacgcattcgagagtccgcttgagccgtttggcaaaacatcaggacaatgccggcgatttgaacactaaaagcctcgatacccgcagcttcatctttcaagatgtgcaaaagagcggtacctaacggctcgacgattccttctcgaatgaacatgcggcaaaagtcgtttttcggtgtaggcgtctgcagttcgaagactgatgctattccccgaagtgccgacagaaccaagtctcggttggccgagtagtcttcatccaagagttcgactaatactcgcagcccacggcatctaaataggtcgctcagcctgattcacatttgtgaagtcgggtgtctgcacgtaggcttacgagatgaacatctgcaacgtgagggcggacccagtcagagctccaacgaatgctgccgcttccaggcgagtctctaaagagtatcggcggcccgtgaaagtcttgagtatcggaatggccccgatcagacacaagttttccaggacactaggttcagttgcaaccatctttgatcggggatcagtcatggctcaatacacctgacacctgggcgactcaccaaattgacgatacgcaaaaggttgaaaatgacctcgcggctcggagccgactctaggacctccaagacggctagcataccatgagagagaatgaaatgatcttgtagagccggagcaccttccaggatattgaactgagtcgatcgagtcagattagctacaaagcggcacgttcacgtttgaatcgaactaactcaccagctcgatagtgtcgtactgtaatgtatcctcgttcgacgtagcctgcagtcgttctattatagagccgactatgttacacagggaagagtgtttgtcgcgcaacaaattggcttcgacatccatcatagaataggaatcttcgatctagagcgagaacacgtcagtgacacaacgaccgacccgtccgtcagaacttacgtctgcgaaagggtcaaagtcatcatcctcgacttggctagctatccagcttcggtcagaccggcgagtgccaagtttgagcatttcggaaggagtcgagagtggatctacaatgggacagtgagtaccgctcaagaacgctataacggaagtggcctaggacataccgatatcaccttccagggcttcattcacgccgaagacatcatcgtagtcctcttcttcaccttctgcatatttccttagctccttttctgtcgccttgagctgctcgacgtcgtctgcgggcgtaaatcggaaggacgatgtcctggaaggcgatctagaagatccacttccgagcgatcctccggatcccaatctcgggcgttgcgacagactaccgactatgtcgcgggacgaacttggtctcgagggcccgggggtcccgcgcaagctcagcatcgagatgtcttcgggccggtagatcttgttcatctgtagaccgttcgtcttgaagcgctgaagcttatcgttcagttcactttcgtctgacggggcgagatcagagtagtcttcggagctgtcatctcggaatagactggaggatcctgtaccgaaacgtccgattgaggagattgagcgtgttacctcagggggtgaaccaagaggggactttgtaggtttgattgtcttcatattgtcgggctcatcccttgagcctttacctgtgcgaacttttgatttgccctcattaaagatcctgcgtctttcagccaccaggcagactttgaatcccgcttacccttctcgaacctcttcagatctggtgcttccgcgaaatcgtcatcccacacgctggcgtcttggtcgctcgattcgttcggctcatccacctcgacagtattgcccagtggtctagaccatatgccatttggcttgcgcccgacagatgcgaggtgggctgcaagagattcgcctgaagaggattccgctactgcgttcgtttcgatcggccgagccattctgctgctcaggtgaggctgtgctctggctacccgtcgaagtaccttgggcgaggatttgggtacagctacggcatatgaggagatcagtgcttcccttgtgccgccttcatcaagactatcgatgtgcttaccctgcaaagcctcgttccactcttgcacgcgttgaatcgcgtcgtcgtatactgtcgtcaacggtctccgttttaggtcgttgatcgttttaccggcccccgagctgtcttgggaagcttcccctgacgtcgcttgcgaggattcgactcgtatgacaggagtttgcgattggcttgacggtttccttctcgtaatgactagcttcgttccttttttgccggtgcgagaagcggttgggctagtatcggaacccctcaccgagtcgccctgcttcgagtgctcaggcagttcagcacgatccgacagtcgggaagactcgatctgacgttgcgaagccatcatccaaggatgtttggccagcttctgagcagtgatacggaggttgggatccttttgaaaacattggtacagaaaatctttgaccatctgatgagaatcgagaggcagttagttctttggtcatattcatatcgcaaatgagacgcaagagctcacccccgacgcaccctccgggatgggaggagaatcgtcctgtacaattctgaataatgcttgcatcggttcaaggtggtggtaaggtggctggccctccagtagctcgattaccacacatccgacactcctgaaaaggcataataggatcgataaccatgcaacagtgtcgacaactcgattagaagcagagacataccagatatccgatgctgtcgtcgctccgttctgttcgatgacttccggtgccactgcggagacgccctgatcagtgtgaagcaaggcaaaacgcaaaccgtcgacgggctcactccaatatggactaccaactacggactcgtccgctccggctcctgagccgtctcccatcaaacccccactcaagcctggcatcatcgttgccacaccaaagtccgcgagcttgactgtcccatccttgttggtaaggatattcgcacctttgatgtcccggtgtatgactccttgggagtgtaggtaaattagaccttgcaagacctgaattatgtggagtcaagtcagacaggagggttgtggtggaccggctgtcagtctatatcgagcccacctgcgagatgtagacggcgactagatcctcggggaatttgccgtaacgcttcaaaatgtactgaagtgacccgttctcgcagtatctatcacttaatcgattgcgtcagtctcttgccggcatcgaatatgtgcttgaatacttactcgaggataatgtgcagatagtcgttcgtcttgaagaagcctacaagcaaggttgagatccatcaagtcttggcacgaagctgggaaaagccaatgaagaaaattacccttgtacttgacaatattctcgttctgtacacgtcgggaggtcaatcaatcggtttcgagcgagaacattggatactcacattcaaattctttagcagatcgatttcgctcttcacggacagatgtgagcaacgatcgtcgattcactaaaagctctgatttaacgtaccataatgtctccaagctcagctttcggtatgtcgctgacggaaatcttcttgattgctacagtctccccagttgtccagttcagagcctctgcgacggatagcaggaggaacggtccattagcggcatgatggcgcgtcattgtacaatctctatgggactcactgtagacttgagccgacgctcctttgcccagcggctctcctagttgctgataccaagcgcaaatctgctcaacatggggtgctagcctgatccgtttctgggctcacatagtttgacatggacatgctggcctctcgctgcacgccttgcgtagtctgacgggaagccatcatccagatcttttcgagtcccaactgttctttgaaggtttgtctgctatagctcaggcatggactcgtgaccagggtttgctcgcggtttcctgctcctgtacggaatgccgatcatcctcgagctcaggagagcagtggtcggaaagcgagtgctccagtcacgttgcttgttgatatcgaaatctcttgccaacgaataccgagccgacctgtcacgagctcctacttcaacgatggtagtgaggatcgaaccggtgatgtcgaatttagggtcgtatgcgattgatgggacatgggtacacgggacaatacaaggttgcagtatccaagatgcaaggggggaaataagggaaagcatccgatgttgctgatgtcggatgtaaatatcgctcacgacggatgttaatttacttccgccttcaactccgaggcttccccgacctcgtcgccggtgttagtcgcctttgtacctcgagtctcttaaacacattatgtatgcgatggctgtaaaattggaagggattgcagcttcgcagtgaatgagagtgatctattgaagatcctacgctacaagtttgaaaaattgagatagctcattactcggggcctcccatttacgagacagttggcctgctatgattctgccggaaacagcactggtgctatgggtcgctgtgtcagtaatacatatgatcgctgatccatgcttgtccgtcctcccggctgaaactctcacttccgctattgtctaggtcttcgtggtactgtgcgtgattgttactgagcatagcgcattcggcgtatactgacacgacatggaattgcctagacggctaccacatctcggagctaaacttcccgcagccatccctcacatgcacaaaccgttcaactagccattcgaccttcccagactgcctggatgttagtgagaatcgttactcaatcatcacggcggttctcaccgtcggcgggctcttgggatcgcttgccacggctagagttatcgcccgattcgggatgtacggcacgatctggttaacaggggcagtcaacttggtgggaagtgtgatcatgactatctctacgcactggatcggtctagttttcggacggtgagcaggttgtctgtttgggtgatacgtatgttagctgactcgagggattcgattgcagtctgatatcgggcctgagcgtcgggcttgctatcaccaccgttcctcctctcctttcccacatcgcgatcacttcaccctcctcattccttagtaccaagcggggccttatcggtacactgaatcagctcgggatcgtactgggtatcctcagcgcgcagctagtgggtcttggagcgacgggcatgaagggagatagaaacggtggatggaggtgggttgtagtagtcagcggcattgtggctgtggcccaattgggagttgggatgctcctgcagccacacatcaaacttcgtctcaaggggaatcccgacgagccgagaagcgccgcacccagtcgcgatgacgagacggaaggtgggtactgtttgatcagccgccgcaaattcattcacgaatgcggcccgaatacagcagagcctctcttaagtccatccgggacaaagagcgtgcctcgaccgagttccatctccgagatactcgccaaccctagtatccgaccacaagctctgctggtcgcgttcatcctggcagcacagcaatttagcggtatcaagtgagtgcaggagcatctgtcaagattccgatgatgatggcttactctggttgcctattatggctttctcttgatgtagcgctgtgctattttactcgactccggtcctgaaaccgatcatacccgaccaagcggggctgatcgggatcggcatcgcgcttctgaacgcgttgatgacgttcccacccatgtttctcgtcgacgtaggtctctcccatgacatatttcaagatggaggctgacgacatctttcccttgccagagggtcggacggatcccgctcttattgacctcgctcggaggaatgatcctctcctcgattctcctctcgcgaggactcgacgcgcataaccagaccctctcggctgtccctttactcctcttcgtagcctctttcgcaatcggcctcggcccgatcccgttcctcctcgtcagcgagcttgtccctgcagaagccgttgcagcgacctccagtatcgccctatcgagcagttggatcgcgggtttcatcgttgcactcgggtttttgcccctgagggacgcccttggatggatgcacaagggagtcagggagggggaaggtcgggtattttgggtatttttaggctttcaggtatgtacggccggggtcgtcgtctggaaattgtacaagaggtagtcggtgctcgtctcgaccttgctgggaacaatgacaaggaaatcgtgttaaagtcagtgagatcatgttacggcgacgatcacgggccacacagcggtctgactgttgaactgatgggaggccggcgaccagcgccatcagatcgacaatgcgccagttgactacccaaggccgatctcaagtgtcagtagggcagaattactggatataaccctgctccacaaaaagaggcggatttgattgtcggacgtgatgatctttgtgctactcagcatgcttgccttttgttttcttattcatcatcacttgtaacatataccctgtttccagcctcgaaattattcagcccccaaaggatgatactgttcctactgtatatgttgatttttgatctgtaacagacttgtgctgacatcatgttcgtcagacggggtctggtgtatggcgcgctagactacatctgtacaagtcaatattacatctgtacgattcgatatctaaaactggccgtcgagctgcacctgatgtgcagccggaagatccgaatggtatgggtcaataccagggtcatgctacccgacccaaggggaagagcggcatggtgggcgtgctatagacagccaaggctctgttggtgcgtcggttgtaggggaagtgatataatcagctggcaggcaccgccgtgtctgctgccttccgccataggacagcgatcgctgggcatgatatggacatgaagcaacgatactgcactttcctgcgcaagtgtaatgcacgggcggtgtatagcgcaaacaagcattgtgatgacgaatcggatgagatagctagaatcaattgcgcccgtcacatcctgatgaagcttgatccgattgtacgatataagtggccaactgagcttttggaactgcaaatatgtttccgccgtccgccatgttgtaatgccagaagttcccgacatcagtccaatctgcccacgcagcaccgcctgtgaaaatcacgtgattttgcgatcgcaggtgaaacggggatttgagtaaggactcgttttatggtggaatgacccttcgtcgatcagataggcacggtctccttggtcgtaaaagcggttcaatcaggctgtctaggcaagatcgaatgattacaagagctcaattcggtatattattggtgacaaggtttcacacaccccccggcgactgctcgttagcctctcgaaattctttaagcgactcgtcctttgtcttcgcctggtcgatccataatccctcggccgtgaggccccaaaagttgttcaaacctgtccagtctggccagactgtattggcaacgccatacttgtaggggttgggtagaaatccttccggcttggtctcggcgtatgccttcacccattctctgatgtactccgcgtctagcgcacgactttcagcctttaatgtctcgttcctatcgattacgtataagctcggatgccagccgtggacagcgaggaaactggatcttgccataattttccggcctccgtttcctgagtgaatctttcgtcgggccatagcagagcttgacccttccagttgtccatggtgaaaccttcagcttgagcgtcagtgcttatcggatccctgacatgaagtggagggtcagtctactcaagtaaagtataaagccccgccacgcattactacgggatgactcacttcagcatgaaataaagatcatcgctgacattttccgtgaagtagttgtggaataccaagggggtccgcccgtaccctacctcactccagtcgtaatcggctagtccgtcattaggtatggcgtctgctccgcagaacggtgcgaccgctaggggtcgaccataagtctcggtgatcttgaatttatctctttgcgtgaactgttctgcccgtttggtcatggccggaaagtaaaaaaccaagccgcaattgtccttgttatcttccaccgtgcccatcatggtggtgacatagtctgtgaaaccatacgactctggcgtccaaaagaagttcaatgctttttctatcctccagaatgtgcctttgctccgggaatccttcagagtctgatcgttgtactcgggggacaagacgtatctctcttgatagttgacgaagaaatcggacagatacgtccagtccatatctttttttttcccggtcctcgaataagcgtggctccgtaggggcagtaagcatagagagaacgtcatcaaccataaaactgacggcatgttggtggtaatcttcttgatcaatattgccgtttgcaatcgctcttgcgctttggaattgtgtagggtaccatttgaatgagtttgtaacccctgcactggagatccggcgagggctttatagggccgcaaaagataatctactgaacttgtaactcaaagggcaatcactctcagaaaggaggccatctttgccaagacaaacatgtccccttgcattgccccatgttccgtatacggggaaggctgggcattcatcgatcctttcagcttgtacccgtattgtctcttatcccgacctcggtctccactaccttgtagcgctagctgttcgactgctcgttacggaaagctgctatttcaaaccggggtggccgggcagatttttgattggcctcatatgtgttccactctgcgacttgatttactttgaaaggtctgaattgtacaacgtccgcctcacccacatcgcctgccctaccttaggctttgttcttcatctcacggagagctgtcatgacagagaccggatccttggctccagcagccttcctaaagaaggcgcgatcgaaaagtttagcctgaaccgcattgagaccattcttccagaagctaagggggaagcacagactcactgcacagcgggttcaccgagcctcatgaagacgttccactttttctcgtcggcgatagtggacaatcctgccgtgcattcgttttcttctgtcaatttggccaaactatcatcggccgtcgtcagatcggtacgttatgagccatcagcccgaagccacttgacgcattcgtcaatcgagaacgtaccgtttgacgtcggcattctcaggctcaatcttgagcgcaaacttgacattacccggagtgtactcgtgtccgttgtacacgatcgtgtcttcaggcaaagtcccgaggtaactcaatgccttgtgcatctcctcgggagtcccctcaaagaatcggccacacccgccttggaacaaggtgtctctatggaagaatgaaaacactcagtttagatgagaaatccgcctaaaaaacttccgctcagtgaagtccgttacgtacccggtaaagacacccttcttgccctgctcatcttccaagaggaaacagatgctatcctgggtatgacaaggcgtgtgcagcgccttgactttgattcccttgccgaaagtgaactcgtccttgtccttgacgacggtgttggttccaggagaccgggatccggcataggccttgatcgaagacccttgagggtggttagagagctgcgcgcgggaaagatggaatgagtaccgattgttcgctcctccaagccgggcttacttacgaattcgaggttaccgccagaatggtcatcatggtgatgagtagtgattagcgtggttacctaacaacccatgtagacgcttcagctttcccctcgttgccgactggtagcaaggccacatgagccgctcacattgacgcccttgtccttgacaaacttgagcacctttcgccaatcgtacggatcgaccacggccgcttcgttcgaagcctcatccacgacgacatacatccagttatcgctcctggccaaaagaggatgaatctgcatgttgagactaggcacaatcgggatcatcaaaacagaccggaatgtgagtgtgcacgcatacgtacgctgatgatgttgcaaatgatctgcggaggagaggtttcgtatagaacaaacgactgagtagcatgtagatcacgactaggatgaaggatgagcagtagatctttgtcttggatatatgcattcgatcgtgggcgttggcgagggatgaagattgatgggtattccaagcaggttgcaagttgagggggttagctctgaagtagaccggccggtctcattacgtcatctttcggcattgatcatctgcccggtcgatcgctcggtacaacgatgtcatgcgcaagacgtatcctcacggcctcacacttgggtcgaacgtatgtaagctaggctaggcctgccgtaggctgagcgtgaggagcatagtgagcgggacatggtagcccgagttctcgctcagctgcgaacaacgaagaaaatgggcaaagatagactccactgatttaggcactcttcactcctagctgcaacatcgatcttaggcaagttgcaaactttgtacggcaggatagcctacatgtctgaatctcggaaaaactgatatcgttcacccagtctcataatcacaatcgttcaccgtcccactcgttcgtaaccagaaaagtcgtctcacattcctcgtaccccgtcgagttccttgtgcgatccgagactttcgggcttagcgctccatctctcttctgcctttcccgcttgtcgtggccctgttcaggcaggaagatcgggctcaagcagtcctcaagatcaagtgaaccccgctatcggtatccacgatcgagctcatctgaccggcctcgagagcgtaggttgcgtcctatcaatgcgtgacgagaatgcgagcagaggtccgagtcgagccggttcattagtgtaacgatgagaataagattgaccggacggtatagaagcagatgaaagagaggtgtatacatcgttagcctctacgcaaggaaactttccccgcgtcaacgagcgacgagactcacctcgaaaggcttttgcatgcttccccttccgaaccaacccaagtcgcctcccttggcatgactcgcacaatcgctctccctcgcggcgagcttggcaaactcttccccgagctgttgagcggggagggaacgaagctggttttcatacgactggagtgtggagatggcttggtctttcggggtggtcacgttgggctacggacagttcggcaagaggtcagctcggatcgctattcatgcaaatcgtagggaaagacgatacatcgccgggaagtctcgactcgacaacactcacgttcttccagctggccggtcgtcggcttccactgtgcttgatcaacagatgactcgccctgactttgccctcgggggcctttcgcaagtagtccttcgctccgggccactgatcgatctcctccctcgagaatccctggggttccacccaatcggactgttgcgtctggttgttatagtaatagggcatcgacttcgagcgggaccagcggacttcccagatggggttgccttgggcgtcctgcaaaacatcaaagggtggatcagcgggcaaggtcgatgccgctggaaaggcaacaacccgaggtcacttggttcgtcgttgcgggcatattgaatagattgactggcgttgtggtagtgcttactgattactgcgaaggtatcaaataccactgacatgatcgaaggtgtgtagttgtacatcgttgtggttgtttatgaatgggtgaattgtgatgagatgacgagttgggttgacattgattatgtaatcatgttatcacctccccccgcccgtctcaacaacttcggaaccggctttcgcagcaaaaacagatctcaacgatggttcatatcggcaacgctggttttcaaaagcaatgcatgaacaatccttcttgcagacactagaacgtggctcgagctcctcacgtacacaccactatacgcctcgagacagccttacactacggtcgtcgacgtcgaatcctcctgccgagttttcccgctcgtctctcttccggctcgcgcgggcaaaatcatatcagctcgacttggtcatcaattcgcagtctgcgtcggccgacccggaccagattcgatcgacctaatcgttgcctcttgtcatcaaagacgcccatatcctctagccatcatcacgctacctctatcaaggacctacagatagtaactggatcactcgttcaggttcatccatctgacacaccatggctctcacgttccctaccaccgccactggggccacagccaccccgtctgccgtgacgacgaccagcgggttgttttccggtccgacgacgacctcgaatacgggcggttcgggctggtttggtgctggcggaggtggaggatccacctcagcctactttcagacggtcatcatcagtcttgtcgcactcgccgtcttgctgatcatctcggtcgtgagttgaaaagtcgccattaaatccggttccgatcttcgaggtcctcctacacgacactgacgtcgtcgttctccgtacgcatttcaatctataggcattcctatactaccgtcgtcgtcgaatgagactctactctgctgccgattggccattccacgatcggacgatgggcgggaacatgttcttcccgggaggcgccccgaatgggaggaacaaggaatccaaggacatcggcgaaaagcccgaaatgtggcaggtcatgctcgacgacgagaaactcggggctagctcgaccgacgttcgttcgggctcgtccaatggttccatggggatctcggcagaggagagggagatgcagcaggaagaggttgagaagaatggatcgttgactaggtggcaaccgttgagcatcgtctcgctcaccacgcatcaggctagcgtgcccgcttccactaccaatgatcaggatggtgctgggaccaactcggggaccagaccgacaaacatgttcaaccggggattctcttcccacgccgtcaaccggtccgtcgatggcgacacttcgcgaacgggagggaacgcgagtacaacgacgatggcctacaactcgaccgaggccacgccgggggcagacccgggtttgttgccgatccacttgacctttatcatcgctatgccccaacccccgtcgacccgacccccacccgtacgatcggcttacgatgatgaagacgaaggggaagacattcccgacgttcaactcgggacgactgtgatcgacctcgatcttccggccgagatgactcaatctggcggtgcttcgtcatcaccgacgaagacatcaccgtcctaccctcccgctcatcctcacccgacatccccgtcgagcccggtcaatcggcatacgtccctcgggcacgtgcttggcttgacctccgcacagccagaacaatcaccagcgggtggagctacatcgacggcactcagcttaagagatgtcttgggtcttcccgcacccgtccaacggactcggcgggaacggaggcgtgagcgagagatgatcggggttcgataagccgggcggtcctatcggcatactttccgtctcaagagttcaaatttcgtgatgctttcccctgttcccgtcctttgtagcgttccctcgccttttcctttttctcttgcaaccactctacaggccgtctgacagattttcaagatccatgcagcgtcaattgtagtgaccccttacacgggtgagaattgtacaacaaaagcatagacagagacccgattacaaatgtgagaactatacgctattaccaaaatgtgggggctatcgaggggacaattgagacaagtatgaggaacggaatggtaccgctctgtcagatgatacggatcttgctccaatcctgctcccgcctaagactggcggcagcggaagaataggcgccaaacgacccgtccatgcttccacctggagcctcggtggtgatgttcatcccaaaggcgtcgctgttattatgagtgaccaggacggcccgttgagcgttcgggtaagaggagacgttgtaagacaaagctggaccggggaagagctcggatttggggacgacggggatcggtcgggtgactgggtgatgcctgaacgtcgcacgggtcaggtggacggctttcgaatcggcatagtcattgaaggcgaatactcggagtttcgtaggaggacacatcgcgatggctcgacgagttccgaggatgatcaaccgattcaacaaggtcgcgtccaggtgagcagcaaagatggccgcagggtcccacgtgtagacgtatccttgatcagccgagaccatacgctctaaagcccggagctcgttgcacatctggtgtttcgcaatagccccgataagttcgagcgagaggcaagttctacttggtccatggccaacgacgacgaacagatcgaccagggtttgatccttatcggacgtcagggggtcgagaatgagcttttccaagtgagagatggcctgagggatattcaagcactgagcagcggcaacttcgtggatgctgggcaaggagcgcttggcggtgagatgataaacgacgtgctgtttgagagctgcatcgtaatctcgcctggcctcggtattgcccttgagttgggcgctcgggacttcgaaatcatgcctcaatgggccgccttcgagcctgtaattccccaatttcgtcaagtcccagacgatctccgtgttttcaaagtcttgctgcactagagcagacatgatgaccactctacctttctgatggccgctcttggctgtatcaagggcagcgatggaatgcccgggtccgtttttgtaaaaggcatagtcgccgtgcatgatgatcggcaccatcggagtcacgaaatggtgaagcatgccttccatattggtgatggcgtctccaggcctgtacttcacgctgatcgcggcgtcctttttctgggacatgaggtgatagaccagattctttggaacaaatgcgctcgcgacgagcaagggtttgatagccaagtgaggcttgccgaggtagtacgccctcgggttgacagatttcgggacggcggtcgaccaaatctgggtcgctgggtcggtccagctggcagcctccttgggtttccaagactgggaacctgtcaacgaaccagcgggtacccaactcatcagccctacatcgccatgagttcactgtatgcgcactgaccgtggtcggcttgcgacgaggaatgcgtctcctggccgtgttggtcaagcttgtgactcaaaaagttcatcatgttcaactcggattgctgagatggggaccgaggactgtcccttctgggagcaagggtatctatcaaatccatgctcttttatatcaaaaagtgtttgctgattgtgtcgaggatgctcgcagacgagccgaggtgctggacgacatctgacctggtgatgctcgaaagtggatccgacaagtcggaagtatatttctgtcaaaaagctgggcactagcgcactaacggcctgggggatggtcagctgaaacgctcgacgagatatgagggaaacagaaatcaaaggaaaagctttgggcaggaaaggttaacccagttggccagttgtcggtaaacgcaagaatcaatctgcaggtctggctaaaatatcaatccagagaacaaagaccatataaagccgggagagataaccttcgataacgagtatgataacgagtatgcgtttcttgctcgctcatcacatgtatcgttttacgagagaggatctaatcgtttttgcttccgattgagatttctgattctgatcagcacctcctcaccggtcttttgcgatccttaggagcagttcgagccatggacatgctatatgctatagattcaccctaatcccgttatcgtttgccgaaattgatctacaccgcacctggaacctagagacagcacaatctcaagatgcccaacaacaaacgacacaccatcaagcagatgcaaggaaaggggaaggacaagatgcatccttcgtctcgaaagggacatcagatggagcgtatcctcttgcgatccgacaagctcaagcaggctaccaggcgacaatacaatgcgaaagagttgaagagtacgtccctttccactctgctagtcccagattgtcgtagtagctcaccagtccgcttactctcgcagtggaacgacccctcttcttcatctactctatgacctcggccgagcctctcaccctggaccaactcaagagtctcatccaggacaaattcatcggaaggaacgacgagagtatcaaagaactcgagagcaagcgtcggcctggtcgacctaaggatgccaagctcgtcagcgccgagttggccaaggagattgaaatgtccgagtaccagagcgggttcggtgagtagccgtccatgcctggactgagctatacatgtgcattaataaattaacggccttgaattgatcttgttgtagaggtgcctgatcttacccactccggaacggctaagctcatctggcgatggctcgagactgacgtcggtctcaaggggtctcatcttgatgccctcaggttagtagcataccctcatcggccagtacgacgacacgtgtcgaaattcgagaagcttacactccaatcttccctcacagggtcatccgagtgactccggaaggtaccgaacctgtcgttgtgcgtgagggccggacggtacagatgggcctcgagcctaagcctaccgccgcacctgtgcgcgagacgacccccgttcccgagctcatgtccgtcgacgcctagactcgcaagggcgagtcttgatgcttttgtaatactactgtactttctgttgtatctgccttttgggtatatggctacactgtaatacatttagatacatatacatatgtggcaacgtagcaaaagtcatgccaaaggcggtcattccgcggttggtgtcgtcggcttggatgacgctctggatctctcgtcagccgcgacgagacccttgagggtatcttgcgccgtcttgctaggagttgggggtcgatcgggttgcaaaaccgaatgagacgcctcttgaggcagatcaaagcccttgatcgaagtcgcccttgatcgagttggcaaggacggtggcctagaggtccgctctggggtcctgggacggctcgaagtatcggagatctcagcaacaggtcgaggcggggagaccagctgtgatagactgctagccgaagccgaagctggcatggtcgttgacggagtggccgaggggattacggctgggcctttgggactagcgcctagagaggagtgtgaaactgaactcgaagtgatctcgctactgtcaggtaggtgagcctcgctgctgatggcggtgacagcgtctggtcgtttcggaatccggggcacggccatggccgccatcccggcgggctgttgacggacaggtgcagatggtcgagcttcgttcatcgagtctcgtcgcccgtcttccgccgaggttgccgacttgaccgaagcggcatccaagcgttggccatcaaggctttgcctggggagagacgggttggaccctggtggagaagctgccagactagctgccaatgccaatcgctcctgcaagctcgtaccctgcctcggagatgactcgatcggtttgcttggagacgatccctccttagtcttttggatctgctgctcgacggcttgaagcttttgagaaatttccgcttcctgtgcggccgcacctagccccccgacagtcctcttggcagcccagttcttgccccacttccgcatgacatcacgtgcttcgttaaccgaactctgcagagcctttttgtctgcagttctcgcccggatgttgttcatcaaggcagccgccgtggcagccgaaccgactgcagccgtgtcggcgtctgtgttgctgctgggcaatgtcccgcgtggcacgaaccccgaagtagcagagttggatgttgagggaagctgatcgagagcgaaatcatcatcctgggcacgatccatgacccttccgccggaggtggcagaagtcactgcttccaccgatgtgtcgacagcttctgcaggtgttgaagccccgctagacctgatctcgaaaccgaccccggttttctcaatcgctcgtcgagcggcagtgttaggcgatgcaggagtggcagggtcggaaacgcggtggtcatcctcgttgctagattcgagcccgccagtcttggtcgcgagccactttcttgtgctttccgagatcgacttggtgatactgtgttgagacgcgcttccgacagactgagcgtcatcttctgtgcgggcgagccgagccggtttgccttcaggtaggtccagagcctgaacagccatcgaaggcggctgtcgcgatttgaccgaggacttccgggacaagtcgctctctcccgaagtggccctagttttgttgacggggatcggttcaagaccatcgggaccaatatcagccttgatgtcgacatccttctgcttgcctgcctcatcaaagagtcctcctctcgctcgaaggtgtcgagtatcaaagaatgccaggtcgtccatgttaggcagcacgatagactcgttgacggcgtcacgaatttgcttctctatcgccttgaggaccatgttgacctgaattttccgatcgctgactacgggtaatacccgcaagtcaatcttgggcggtttcgtgaaaccccaccagatacgattgctagggggctttttaatcctgacgcagacgttaccatgaacagcttgaatgacgaccatgagttccaaattgatgctatagggcttgaatccaaaggccgtaggtatgatggccgtcgtgccgatcgtgattcgtacgttgccggtataatgcaaagccacctcaaaggcggcctccccttcagcagtcagctccttgagcattggtttggagaagctgaggaatacgataccgatcagcggagctcggctaggtgcatcgactttgacgtactagggaggcgtcgttcccacatcgatctccttgaccacgatatcgcccaagaagctcggcgtcttgaccttgcgaacctttttcattactttggcgatgatgaactatgagcacgcaagaggtaagaagggcctctcagacttgcgaaccagctgttgctctgcgagccgactcaccgcctccaaggctgctgtcccgcagattcctaagaagatccttcctagcatggcgttgagccatcgcacgggaatcgaatcactgtcttcgttcagcgtgtcgatgagtttctgcatgtcattggaagaaaagatcttgtcgaaagtcggtcggggtacgtggatcttgctattcgccggtgggttagggtgcgaacgaagcaacaatgcgtggtaccattgttcttgtctatgacgggggaaggcagaatgtcagtactcgttctatattgcttggtctatctgcgccttggcacccacttgacattgttcctggcaaatatgtaccacggtctagcctccacgtccaatcgcttctcctcgcgcctccgcttctccttgcgtcgatgttccagctctttcggttcgtcctgcagtacagtcttgggtaccggaattcccgggtcgcctcgcacaccgtccccaggaagtcccatgtccattcctttcgtcaacgccatgatgggtggccctgctcccggtcccagaccaggaagaccgagcgcatcgtcgccgggtaacacggccttgtcggctgaaccactcggcaaggtggatttgcgttgcaaggtgggcttctcgatcgggacggccatggtggcactccgagtcttgatcgcgaggtcccctgcggcgtcgactcccggtgccgtcctgacctcctcgctcgtgctcgtcaatcctcctcgtcggtccgaggcgggtccgctttggattccagactcgggcacggtcgtcacgctgctcctgctgcgtcgcatccgaggtttgacagggaccgccctgagcacaacggcgtttcgtttggcgaacagctcgccgtccatgaattcactgccccctctggcttcgcgcttgcgtttccttttggtcgccttggacctcaccttgtgcttctcctcgctcgataaaccgctctgtttcagcatctcttgctctccggcggtcatggcgtcggaatcttcggaagagatttcatcgccaatctccacgtcgtcaacatccacgccatccgcaccttcgtcctcggaatccccacgcgagatggacacgctgtagccttcgatcccaatcacgccgagacagttttccatcgaggcgtcttcgtacatgaacaagacgttgcccttgagcgcgcaaaagacgaactctttgatggcaggttgtcgaggctgtacactcgtggtcgagccggaaggaccgaggacagtcctatgcccagaagtcgatcccgaggcggatgctccaggtccggcgttcccgtcgaccatgctacggtacgagttcatcaacatggtcgaatacttgcccgctaccccggtcgacgccgcctgatccgttgtcgagctcgacgcgttcgtatctcccgaccgaccggccgccttgtcattcttggtctcgagcaacccttgtttaaagttgccaacgaccgtctccgtgcccacctgtgcgcctgctccaggcggacctcctccgggggtactagccccgctgaacacgccacttcctctcctctgcccaggagggttgaacgacctccggatggtcaaccatcccgtcagatgtttctcgctcaatttcggggaaggaaagttggttcccgaagatttgaccgagctggatcgatgcctgttcctcagctcccctccgagcgcggatggagcactggggtcgacacgtagtctgttggagtccgtcgccgtcgtcgtcgcagatgtgggcgtgggggtatcggcatcgtcagccgggtccgagctttctgtctcggcgagcaggttcttcaaccgtttgagtgggtccgggtcaccgataggtttcgagccataggtgtagacgtagtctgcgagaacattgaatgggatggtgtcagggcacgatacaaagcgtcgatcatatacttggaagatggcgaagaggtacagaggcgtatgcttacaaatgatgacgagtatcacccctggaacgaacgtcagtcctcccaggaggtaagcatagaggaacgtcttgaaagacatattgcctgtcctgtactagtgacagagagggctccgatctcctagtatcccgaacaaatatagtatggatgtcctcttgtgtcccgctgtcgttgttgttaaaggtcgtcggttgtcgggcacgagcaggtcgcacggtttgcgagttgaaaggagggttcgagcgaggtcgctatggctcgttcgttcgttcaagtcgtcgatgacgcgtgaagttgggacgttcaagagagcgggaagcgagcggcactgaggggatgacggaatgatcacgggcgatgatgagtgaagagtgcgagtattgacccggtaaaatgttcaggaaaagggtttagtctttcttctcctcacaggtgcccgaatgacatacagtctcctctgacgtgttgaggtgccaccggtgcgaccatccgtcgtcgaccttcgcctggatcgaccaagtcgaaccattttgagcgagacggaagcaagaagattcaagtcgactgactgggaaatacttccgaagatcaccccgcgtgaccagccaatcgatcaactataccgctaccgtccagcccctacagctcgacactaatttgcagactcacaaggtttctcaatcgatgtgagtatacttcccttgtcattgtcagacgaccataagtttgagagatctgatgtgtgggcgtgtccagatctgtcgcgaaccttgatcttagaaaatatgccctcgagccctgaacgtcgggtattcgctggatcccgaaaccccgctctcgctcgcctgataaaataggttccgccacttcggatgcaagttttagcgcaaaaggcggggaaacggctcagagtcaagggcaaggggtacggtcgaacgggactcaggtcgaggtcgatggcatttcatctccagctgaagagcacattcattcttaaaggatcagagtgaccacgcaccgatacataccggaaactacgagtcaaggggatcgtcaaagttcacgccacggtcttggcctcgtcgacctattttacgaattccgggtcaaagccagattccgggcacctccactcgagggggttagaagacgacatcgttggcatcccactttcaacttatcgacctagtgcaccggccaacattaaggacgactcgctagtcaacgccctcgagactgtgaattagatattcagagctcctacaaacactcggtggtaaataaccataggaaagtaaaaagggaagccgctggatccaagaagacctaccgagagcgccggcaacgacaacatactatcagccctcttgcggtcgacatatacgctcacggaccgacctcacgtctgaaccgccagacgatctggaatcgaatcgcattggcatcttttctcactcgagctcgtcctgatcgatcatgtcgggcaaccgaagaccttccatccccaacgtatccccctcgaacccatccaaccaggtccatccccctcagagacgaacctctgggtacagacaagacctgccgaccatccccgctggatacgctcagcatgtccagtcccacaacaactcgaacgcgggccaacatccgcactttcatccgaattccatgaacaacgctcaggtgcacatgcaggccctttctcagccttcaactaatgagactcctcagccgcgtcaagggacgtatcccaacgttccccagccccactctcactcccactctcaatcctatcatcatagcagcaactatcctcaggagatcgacgatgatggcgaagatggagatctggatggcgatcaggagaacgaagaggaagatcaaatgttacttgacgatgttagcgaccgggagaccgtcaaccccgggaacggagagtctgggggccatgtcccgaagaaacgcaagtattcgttaacggatcctcagggatcagcgaggtccgcgggtaatggatcggggaagggtacggacggcgctggggctggccaggggcaagggaaggagaagaagaggagacaggtacagagttgttcagagtgtcgcagaaggtgggtcggcggctcttccttgaaagatctcttccgcgcgctatcgagaagattgctgattgtgctggatgatgacgatcatgcagaaagatcaagtgcgacaagaagtgagcagatcatggtcgatgcgcggcagccaaaagcacaggctgaccaaccgacccggtccagatttccttgcggtccatgcacctcgcgaaacgatcagagtatctgcagagaggtggaaaagcatactccgacgacgtgagtggattgttggcagagatggggccctgtagacatatcgactgaggggctcatcgtcgcagtaccggatgtgcatcatcgacggatttcacggctctacagcatcgattatcagtactcgaatcgctactcgcagaatcgggcatcatcgcacccggcacgctggacgacctggtcgccaatcctcaacaagcgaaatccaagccgtctcaagttcagatcgggaccagccttaccgctgcaggggtacccaagctggagggtctcccgtcaggccgtggatatgcacctttatccgatcgtcatcgagatttggatatcgatagcgataccgagggagccgcgttgaccctggagcatctggcttttgggcagagaaagacggaacaacaacagcctggacatgtcagccaaggagggaccaatctggcatcccagttctccgctcaagtcgacccgggccgaagagaatcgggctctgcgagcaatcgcgaggacgtcgcagagatggagcgatgtctgagggagtcgttcagcggatcgacggccaatttcatagcagccaacgatttggccatattgcgcgctaccgcggaaaatataaacggctcgggacaactgggcaacaaaaacccccgtccgtccggtcagatccaggtctcaggtggcaagtctagcagagtcaattcggccatcctcgattcgctcgatccggccgaggtgttcagtctgttttatcagcggagcgatgtctacgtccgtgctctgctgagcgtcgtgccggaccgcaatcggggcgagctgctggtcaagcaatacctcgagcgggtcgaatggttgcatcgatgtgagtcgcgtaagcaaggcgttgccagatgggtgttctcacgaacgatctggttacctaggcttgcacgtcccaaccttcttgaagcagtgccaggaactttgggatacaccgcgtgagaatatcgtacaagaggtctacacaccattcctgagcttgtaccttacgattctctgcgtgagtctgatcgagctcgaaacgggatggtctaggctgagactaccatcatagctgggactatatttcatggatccaaaggaagcgttgcagcatttctcgcagcacgaacgggacaccctgccggaaacatggctgaatgcgtctcgaggggtaagtttgcgacgatagctacaaaggtgccgtaacctgctcattcgtcgtattgctgctggcagagtctatggcagagcgattttatggcagtgcacactatcgaacacttgcaaacgatcacattgatgggtatcttcctgaacacgcgagatcgcgccgacgctgcgtggagtttgcttggagcggcaatcaaggtatgcacttctgatgccaatcttgatgttagggaggctgttgacaatggtcgattgtctagatgggccagggaatgggactatcaaggttgggggcggagccagatctccagcctggagaagagcctcccgtgtggaaagcgccatgggaaagtttaatcaaacgagaagttggtcggcggttatggtggaatgtgagcagattgaacgggctacttccgtcgaggcagtagccaggtggctgacggcgagttatagctcgtctttatggactggagtctcgcaccatcgtacaacttctccagcagtattcaaccagatcagagtgagctcatctgctcttgtcgcatcgattgcctcatccgacttcatgctcttgacagtcaaaaccgccttgcctgcaaatgtcaacgacgaagacattgtcgagggccagccgctgaggccgagacccttatctgagcggacagagctatcgtaccatctatcacgactacgctttgccgagatctcgcaacgacagatttggcaagcgaatgcctcgccccaccctccttactcgttcatgtgagagtcgcactaccctttgcggtactcatccctgccacgcgtgaaattgactctcgacacatttctacagcttaagtgtagataccgacttgcgcaaagcaatcgcggatctcccggcattcttttcatgtgactttgacaacctagaaccaccgccccaagattcacgtctgatggtgttctactgggagaagatcatcatcaatttgagcgggcaatcgagattgatgagactacaccgtccttggcttggtcgcggatacaaagatcgcaagtaagcaaaggcatgcctcagcttgaccggaaatcccaatctgatcccttatcgttacagatacgactactcccggcaacaatgcatacaggcggctcgaaattgcctcaagcttatgtctgacgactttggaaccgctgtcttcctggaaagatggtggatgcccttattctatggtcagtaccacagaggtattgcttgtcgcacacacccgtactaaaaagttcgccgcgacagtcacggtggccgcagtagtggtcctgatcgacttgcttcgtacgccttcggcggacctggaaacgggcgatgcccttatcaagaggaaagaggtcaccaaggcagtcgcgcagattagtcagatcgccgacatgtctcattctgccaaagggtctgtgcgcgtcatcaatcagctactaggttagtctgcctagccttgccagtcatcgtgttcctcaactaaatgacacctggatcctcagccgaattggaagagaagagagccggtatcgtgccttccccaatggaaatgcaagactcgtctgccatcatcaacgctgccaacggactacatcgcgtcgtcaaaaagctcacgactgatgtacagacaaagacttcgccaacagctggtcaagcgttcccgtcaaacgattcacaaccatcgttgacgtcgccagacgtgccaatgcaaatggcctttaccagcaactatgtcccggagccaaccgtacacgacgacagggcagcaatggatctcgcctacggcaatttgggcaacttgttcgaatgggactcgcagacacctcgctttggtaccttcccaatggaagtcagcggggcaacgaatttgggcatgaacccggaaatgtcggtcaactttgacaatgtcgagctcgagaacatgctggcttcctttatgcccagtcgtccaccgtctcctcatcaacatcaccaggtggtcgggcccgacttttccagtcgcctgaccgattataatggcgatccaaaccacgcagtatggccaagttttgatcgtgctcacgacatgccgaaccaattcggtacgccatacaatggatggatgggctgagagtcgccacgcattgcgtcttgaagaggaaccatccaggtcaatactggctgtcacattatacaccgaattcgtgcacatctcttgtacataataattgcatggccagaccaatgtactaaacaccgtattcggcgagcaaggaccgcttccgaacgtccagaagaatgacctcgagctcctccttggtcggctgttttgggggctccatgcttgcttgatccagtacaccgaagaaggatgccagagcagcggctgtcgaagcgtccgtgtttccgttcgactcgcttcccgcctccgcgccctgtccgtccacttttgtacgcttgtcgctctcactctcggttgacgtttcggtcatttcgacatcgtcatcagtagctttacgcttttgagcgttggtgctcgaggtcgcggtcgctgggacattggccttggggaaaggcggtactgtggcatcctctgggagttcgagcagatccaccaatctcgagcaagcgttgtcccaatctgtgcgtaaaagaagggcatcaggatcgatcctcacacctcgagttgaagatcggactaaccctgtctctccattgcctcttcttccttgacgagttcctggtccatctcgtctacatctccgtaatagtctgctccctgattcctaaacttctggaaggccgtgtgtcgtgccgattcttcagtctcttgcacggctgaaccaacgcacgcgtaaatgcgctagtcagtattcgagtatcctctatagagactcggctggtacgactgaccgccacgttggaaaagctctttgacacctggcaactccttcgctcgtccgaaatacctacaccggggtcgaaagtcaagtcagagatgcggcccacgagagttgtgaaccgaccgaatttgactaacttgtaaccccttgttcctggtacttccctcccctcatcatccaacatggccgtcctggctcttctatagttggctccgcccaaagtgacgatctgtcgctcccagtgccccttttcccgcatgagcttgttgatctcgtcgttcaggtctcgaatctcgtaatcggtcaatccgactatgggccaacaataccaccaaagcacggtcagccggcgagattgtcgaatcagccgtcaaagcagaaatgcactgaccatcctggatcttggagaccttgcggctaatatcccggacgatctctcctctccatcgttcacagtccttgagcgaagacacggtcgatgccattcgaggccttcgatcggtcttgggccgagctactcccatttcgatggcctgagcctctcgaaatctagaccatgcaggcaaagatagcgatgatcggctccaagttcgaaatcaggcaggtcgcactttgggtagcttaccggaacagcatagactgagccttttcttgatttctcgcctgttacgtgcatgatatcactgagtatcgcgccgaatctccaccaaaccaaaggaagcagcttaccatcgtgtttcgtttataatctcgtctattttgtgagtgaagtgagctggcgttgaatcagagcaccgacggggtcgatacatatcagacttgcatcacattgccatcttgaacgggtcgactaggtggtttctgtttaaacgctgatttccgaagactgttaatgccacgtcatgacacagattaccatgttgaagtaactggatgtcacggataaattgatatcagtctgtaagctgtctcggatttgggtccgcggatagccgagtcgatccgtcgctccggggtaaaaaggggtcgggcgagccccagctatcgatctcacgacatcgctcgattcgcaacctcaaaaccccgcaacccgataccttgttcaactcttcttttacgtgcgcgtgttagtagaggcagtagcggaagtcgtgaaagcagcagttgagagcggttcctaggagaagcgaaaagaagaagcgacatcgaagatgtaagcctccggtagcggtgcagcactgaccacgtctttcgaacaacaagctgactgaagctttgaatcgtgcgcatagggtatctcaaagctgtttcaagtgagttgatgtggcccttgtccgaaactggttctttccgctaatcagcgatgtgtttcaggtgtggaaaccgtatgttcacgacgagtcgctgaaggcagcctccatggagccgttctcacctctcgtttgtgttctatattcatgcgcctcagtgggccacattgcgggtaagcacatttgtccgtccatctttcgaactcgccgaactgactccacttctgacacgtagctgattgcacctcggccaagttgtgctacaactgcaaggagcccggccacttgtccaccgactgcccgagcgctcccagccacgatgccaagcagtgctatggctgcggaggtctcggtcacatcgcgtcagtagcaatctgaatgatatcgcgtgacccggaggactgataaatactcgcatttcctgtgatctccagggccgactgcccggcaactcaaaacgctggcgccgtcgttcgggctgccgttgggactaggggacgaggcggtttccgaggcggtcgaggtggacgaggtggtttctcgggacccaacgcctcgaagagctgttacgtgagtggcccagtgcccccattattgtctgtccgatgggggatgtagctgagagtcgaaatcttattttacccctatcttttgcagtcctgcggaggtgttggcgtaagcgacgttgttcagcctcatttgtggaagacaaacttacctgtccgcttcatgttcatgcagcacgtcgccgctcagtgtgtcggaggcgtccgaggaggtctcccccccgccgtgaggaagaggcctcagaccaccaatgatggaaagcctatcacttgccggtacatgatctttcttctctgcctcgcctcgtcgtaccgcccgctgattttgaccggctgtcatgactcgacagacgatgtggaggtgagaaccactttgctcgggattgcctggctgcacccagcgttgaggagaagacttgttacaactgccagaccaaaggacacattgctaagtcagtcgtgcacactgaaccgatcgcgcgtgctgtataagctgatccagcgggctgtttactaaactttccaaaaactcagggattgtcccagcggtcctgcacctgccgcagttgccgagaccactgcctagatagacacccagttgaccccttcctcgagctgtcaatattcttgtatagcttcgaagatgggctgctcttatcttccccaaccataacaaacattcccttgacctgcgacgtcgatttgggaaacaatctcttcgtgatacgcaaggatgaaacgaaataggtgatacaagatggtcgttcagcgcaaagtctaagtgcatcaagaggcgtgaatatgctcgtctaataataggaaaatgccggtttaaactgaagtgtccgtcccgcccgctcatgcaccagtcaggaccttctcaatcgttttgttgatagagtccttcctgctcgtcaagtcggccccgaatcgtttctcaagctcccttcgtacgctcttcttcgtcaaagtttccagatctgtcccatcggctagacagatgttgcgaatttctgcttccagctggtggtcagcgacatctccaggacctgattcgggcaagaatctggagctgggtcgggacgcagggaaagccccagtcggggtaccgttcccgcccggcatggggtattgagatccgaggtagtcctgagggttatacggatcgcgctgtgccgggtgtccgctgtagatcgagccctggtcgtagccctgcatgcccgtatgcatggaactggccccaccgtacattgaaggagccatcgtgctcctagcgtcatcggcatagccggaaggttgcgcaaacccatagccagaaggcgagcgggaatgcatgcctgccatgccacgcaagttggcttgcgaggccgatggggagatgtgggaaggcgcataatccgtacgttgtccgtagaacgacggagccctcgaatcggcgaaaggctccttctcaggaacccaacttccgatcgaatggttgtcattgtcattatcccagagttcgtttctgcaatcacaagtgagcgtttagattcaggacgagggtaaatgccgcggtttgctggacgcaaaaactcactcgtactcccgccaagacttttcagggatcgacctcgggtcgaatttgccctcgtcctgacgatagccaagacatcagcgctacttcgatgtagagacgatacggtcggatactaacatgaatgacgaccttctttccactttctcccaaaacaactcgagtgtttccccacacaaagacgtccatgtgccagaaggaatacaggggcaggaagaaggagaaaactggaatcgctaggatgtagactggaggagtgggtcgacgcagccgtgtgaatgagtggacggccagtgaaaagatagggtgagaatcggcacttacagagcatccatgcgatcatatcccatcgcagacggaatatgaagatcaaggcttgtaaaccgtagatggcagccaacatgataatactgagtgtcgggattgtacctccgtcattgatgatgacgtagagaaggtatccgagctgtatgagagacaaatgagttagtacagtcactctgcgagacaattgatgggagcttacgtaggcaaccgtgactggggcgatgatcgtgctcaaaagatcgataaagacgattgctcgcattccaaagaagccgcagaaaccacacaagccctcgactgtcgtcaattcgaccagattgtgcacagtcgagttgatccatcgtcgacctaaaagttgcagcaggagtacattagtaatgcattcctccgaaagcgatgcttgattgtggacccacgttgcgagagcaagactttccaatcgtcgggagcgacagtaaacgcgtgcgcgtcccggacaaatttggtcttgtgggtggggaagtgtttgagaatcagggtggtgagatatcgatcctctccgaggtgcagcaggttcttcatgtgaagcgtatcaacccgattttcttggtattcgtgaacgatctgttgcgacacaaagagaggcttgtgcgtgtcgggagctcgcagcctgtaaatggtgaaacaccccggcagacaggtgatcgatccaaagagcgattcgaacgacttcgtgaggtgatgagagataaagtattcgtatacctgcaagacgaagctttctataagatagtgttctacttcagctattcgttggtggattatgactgacctgcatcatggtaatcaaagactgcttagggttggcaagctccgtctctccgcatgcaccgatgattttcttatcgtgaaccattctggaagccttggcctatcaggatcgaaattacgaggctattcgctaaatcggactcacgcggagaccaggcggttcaaagccagctcctcgaccgtagtatcagcatccaccgtaaagagatactcgtagaaagttggattaaccccgatgacatttttgatttggtgatacatttcgagttcgagaggattcatgggagaatcgaagtgaacctgaagaaaagcgttgcagacggaacatcagtaccatcgacttgtgcaggatagtacgcagatcagaccgaccttgttcaagaaatgcatgacgaccatctgcgagtctcgctttcctcggttacccggtcgctgacgttcgctcggtttgccgattttcactagaaccatgtaagggaccacatgtccagcgacctcgtacaggccagagtaaaccttgcccatgttgtgctgcttggctccatctcccagggagaggaacgaaagaggctcagggtcaagagtcgggtctgcaccgagaatatccaacacgatccgaggggttggtcggtcatttccggctccaacgatgtttccatcgcaaatgactaggagaagcttgcgcttatcatcgtatctcagccttgccaaggagtcgatcgtcttccgaagtgattcttctccctcggtgtagcaaggaatttggcagatgacaaatttgtcgtggtcttcaggggcacgactagatccaaagtgcagagctgccagaaatttgaacccgatgattgccaccatgatgatggagaggaccagcaagatgtatttcgagaattgacactgggccgaatttcgattgtcgaccttcccaatgaggaataaattcctaagacaggtcttttgccttgccaccgtgtccgctccgatgcttccagaaaggtcatcgagcagcttcgttacgtctttgccagcgttttgttggaaaagcgagatgatttggtccgacatgaatcgtctgtcagtatcgggtggaatttggtatccagttggcggcctgagaccacctccaccttgggcgatgtaggtcgacaattcgtatactagaccgttgtagatggcaacggctctgccagacgaggccatcgagcggatctctttcggcgtgtagcccatgaaaccgagtcggtagttgtagcgcagcatgacctgaggagacatgcgcacatgagttgtgctgatagtgaaccgagaccgtgaacggcaacgcaccatttgttcgaaataccagtctggtcgcgagtcatttgtataggcccggaaatcgtggtattgcgagttaacattggtcgtgtttgtcgagtctagggtgacccatgggctgacagtcccgtcaacaccgtcacatagcgcggagacctgacatgcaagtattagcatgaaacctttctggggcaaggactgtagtccttacttgaacggggaagaggctgctcgcatctatccccccgaattgcatcacgctcttcgtagggacgacctgcgtgacagtcaaatggctcggtgcataggaagtaagatcgaagacctgcaagaaccacgaattgtcagagatccgtgccggccttctgctggagagcttcgctcacctctcctcgaatagcgacatagacgctgtttgggctgtctttgaagttgtgttctgccagttcgccgctgttgtagacgtgttgtcgcgggcaaatgagattacccaagatggcgatgacgaagatggcgcaaccgcaaataaaccagatgatcatattgatggcaagcttttccctccaagcttgccggatatcaggtcgcttcattccaccgagccagctgagcaagaagccgggaatccagaacgtcagcaaaccgcagagtagtcgccaacggcgacgggaaggtgtctccttcagctcctcggccgtctcgccatcctgtggggcattcaaggcttctttttcagccagacctctgtccttttggtcaacagccgagaacatattcttcgacggagcgtaagcctcggttccgacgaaggaggcagagtctccatatcttgtgtgtcggtcggtatcatattccaaagtctttcggtcgtaatacgcgtcaccatcttccgagccaggagtttcggcgtaaccttggtgggctaccagtggaagtgcagcttgagaggtgttctccatgtagggattctcgtaaagatccgatttgcgaggttggttcgagcctcgtgctccaaacatttcagactctggacgatgttctccggccgataggtacgcgacagtgacaggcctctccctttctcgaggatcttcgtcttctagcctgagcttgtcttcgagcttgtgaaacgccagttgcgaaaggaagacctgtcgggtcgacatggagttagaaagtggttcagacaaggcatgctgccttgctcaccttgtatttgcccacagccatgtcgtcctcagtccatcctttagctgcaagcagcttcttcatagattcgccaggtggagaagagcccccatgcaagatgccatagccgttcaactccgccgcatacctctcacaagcctcttgatgggtcatgctgacttcgtaaacgtgctttagcttcttggcgagctcaggcatgccaaaggatcgcacttgtccgcgcaagccgcgggtctcgacctgattcgggaggtgcgcatcgttagggttcaggcagaagatataccaggttcgagtctcgttgagcgcttgatacagaacgtccatggacgacttgaattctcccaacacacagcggatacctcgggcaggcgcctcgttattgcctcctcccacatcagcgctttcttcccctgcagcagcatcttcctcttcaccgactgacgccagacgaccaataccgcgaccctttcggcgcattgaaggtgcgcgcatcggcttcacaaattgctgagcagcgacgatggtttcctcatcgtggggatggacttcggtcgcaacagccttgtttgtgaacaaagcctggacgaaggggttggacgaaccggtgctctcggtggcaccaggaatgacctgtccgacattgcgcctgttgcgttgcttctcgtcggcaggattgcctcgaagcagagacacgaagtcggggttgataacgtcggcatccttttcgaggaacgcttcggtcgagtaggtgacaggtcccgtaaagtggctgaccgtaaaggtagggaaacctgtcctgtccataccgctcagcttgaaagaagcgtgattgctccacctcttggcgtaagcctcgatcatggtgtgttccgtcttttttggtgctcgtcgagcttgatcatccgtgatgtgaatgagtccacccggctggttgtccatcagacgtaagcactctgaattgtcgaagaaggcgacaggaggggaaagtcccgtcagaccttcctgcgcaaactcgtcggtcatcccattgaagactcgctgcaagatccaattctgcattctctcgttggcatagttgacgcagaattgatcgagcgaattgtttttcgagacggaaccagcgaggttctggaacccaggaaagtcgagcaacccgataaagctagcaaagtcgtctttacagagtttttggttgaggtgttccgtgatccaggtgaataggagcgaatagagtgtgttggccaattcgtccctattcgccgcagcgccgtcgctatctagaaaggcggtgactagctccttctttaacatcttgctccggtacgaaaagactccctcgagatcctctgctcgaactcccaaaaagtctgctacaagttgcaagacgtcgacgttcttgaccacggccgcgtcctcgttccggcccttgtcgtagacgaattcgatattaccgaggtgcaagattgcggctaccaattggcagatctgagcgacgttccgcttcgacagcccgacagccttgaaggcggcctgcaactgctggaatcgcaattcatcctcgtcgctagtctcgatccctcttcggtcgaaaggcgacttgttccctaggtaccggtaatgcgtgttctcgtccaggaggagatgattcctctcttcaggcgaagcaccagcgacgaggtagtaaaagacgtgaaagttgcgctccccagtgggcggggaagagacccggggcttctccaagtagtatgcgagcgttttggctccggcaagtcgacctcgagtgctaaattggagctcggtgtatttgccgaaacgagatgcattctcgttctgctgtgttcgagcacttccgaaggactcgaggatgtactgcaaggcaagtgatacgaccttttcgtcaataacgcagtatctctcttgtatacgagccgaggagagacttacctctgcagaaggaatctgtgagcccagcttggcccccttctttcccgcattgctcaagctcagctcgatgatcgatttgatgctgagcctcctcatcgccgattttcccgcaccggtctctccactattgcagaagaggccatgtcgaatgtgtcagcgacctagctaagtgtgtcttctgttctcggtgccgctcacttgatcgcgatgctctgatcctgaccagtcctcttcatatggtagtaggcgttgtttgccagcccaaacacatgagggggtaatcgtctttcatgattactgctgctttcatgcccaagagagctgtcgtcgtctccaacatgacggtactcctcggcataaagctggagcgtcgtatcatcgttgatctcgaggtgcttgaacgggttgagcgagacgagcgcggaagatccgatggcagtgtacggcttgtcagccaggtatctttccctcaagcaggcaaggatcgtatcttccgcgatggacaagagctcgctaagtggcgagggataaggaggaggatcgatcagcgtgctgtgctgtagccctgtctgaggggaagctattgttacctgagatcagcggtcgcctcgaaccgggatccaccgttccctcgagacatgatgcagagtggtatctacccgtgattgaaggtcggatatcaaagtgtgttgatgccgatctgtgctcgaagcactgttttgcgtaaaaggcgtagctagattcgtccgttcgttgttgtttgttttttggcgttaaaaggtcgaaaaggaacgtggacgtcggaggctcgtgaatgaacgtcgttaatagtgtccaaaggattcgcgagatggaaccgctgttcacttcgagtctggttgtgtcaaatgattgatgttggggagggttgatcgagatcgttgattgcctgccaacttttgcctacggtcacgcccacacaaagacgacggggagagctcaatggcatcaattcccttggttctggctgagaggcgagaacgacgagcccctggcaagcgacgcgcattctgctgacgtaatgcaattacgagaggaatcgtgcacagccttgttccttggatgccctttgcattacgtttcattcggacgggtcgctcaccgatctgacttctgactgaaatacaagctgtcgaaggcgatcctgcatccagaatggcacttccgtattcaatcaaaagtttcatatcgagtttcttgcgcgagaccggggtcggtcctacagatgtttgctgagtctcattttagcagggggatgacgagggggttagttgcgggacatgtaacggaacagatatgaccattccttgagcttggtcttgtttctctcatatggcttgcgtatgtcatctcatctcatcaaagccgtcttctccttgtgcagaattttgggttcatgtatcagggtttgaggcagccaaacggcttgcagtgagatagatgagcgatctgggtttccctcaaggtcacgtgatgtgaatttccaaaatatcaaaggtggaggtcgacccaagtatctggcatctgcgagcgttcggactatagcttggagaccggttgatcactcctgtccctgatcgctatggtgtgatggctatgtggataagacacacgcatcggaatagcttgcgaatatgtctgataccgaacaagtcgagccgttggcccccgccgtgaccgaaaaggtcaaggtgaaaaaggagaaaaaggacaagaaggagaagagcgaaaagaaggacaagaaggaaaagaaggagaaaaagtccaaggtcgtcgagactagggacgagattgtctccgaagccgctcctgaagcctcgggatctactcaacccatggatgtcgagcccgtagctaaggctgaagctgtcgacgtcgaggccgaatcgaccgagcccaagccaaagaagaggaaacgcaaggaaggcgaggttgaagaggacgagctcgagatcgacgtcgatgccccgacccccctgtcaaaagctcaagctcgtgctgagaagaaaaaggcaaagaaggacaagaaggaaggcaaggtcgatggcgagggtgctgccgagggaaacgatgccgagggggccgggaacggcgagcgacccaagaagaaggcgaaaaaggaaaagaaggaggacgaggtacccaagcggaggaactcgatctggatcggaaacttgtctttcaaggcaacaccgcaatcgttgaaggcttggttcgaaggcaggttggcattgggcaaagacgtcgaggtggatgacaacagcgtgacgagggtcaacttgccgatgaaggaagggcggaatcgatggggacaccaggagtgtaaagggtgagtaaggggatgtttcggatacatgaccgatgttggccgtggattgacgagtcgatggggcaacagattcgcctatgtcgactttgctacgcccgaacttcagcgaaaagcggtcggcctcagtgagaccttgctggacggaagaaaggtgttgatcaagatgggtgcgtccattgtccagtctatgatctctttctcaggcttgtagctgataatttttccgggatgacaggcgatgactttaccgcccagcccgacgcacggacacccaagcccctgtcagtacccgccggtgccatccccaagaaccagctccacaaggagtcttccagtctgttcatgggcaatttgccctttgatgctaccgaggacgaaatccgggactttgtcgagcaaaacgtcaaacagcataccaaggagacgcgaggagtcaagggtggtgacgatgacgaggactcttctgatagcgaaaaggaggacgagagcgatgccgaggggagcgggtcggacgacgaatctggatccgacgatggagacgatgagaagaagccggtcaacacgattccgacctcgtcgtgtggtttgaaaaaggtcaggatgccaacgtttgaggattcgggcaaatgcaaggggtgagtcgaggaatgtcagggacgtcgtttacatcagattgggaagctgagtcatgcccgcgggtatccccacacacagtttcgcttttatcgactttaattctcccaaagaggccacctacgcgctcgcggtacgagccaatcgattcttcaggggaagtagaaagctcaacttgcaggtgagtcgtgaggcaacgattggcatgatccggcagctcgtatattgactgccatacgctactctagtacgcgtccgagaacgccacctcgcgatcaatgtcccgtaacaagcgtttgggcatcgacgatgcggccccatcatcacgaggaccccccacgggcgctcgacctcctcgctactttgaccgatccgccaggcccgagggcgaagagcgaggcgcacctgccgctcaggatggcgaggaagcgccggctcgaaaatcgacgagcatgatcggaaagaagtgggaggtcgcaggacgaccgagaccgggagctgcattggccatggccaagcgagagaacgtgtcgatcgttgagagtcaggggaagaagattaccttttagacgggagggttatggcgaggggggtcgggtcgccttgtctatcgttctacccgcgcttgtggcttggagttgacttgaggtttgtagcgccttgtggcgtgtcatgtcttgtataccatccccagtgttttctggcttgccgtcctctaccgtcgccaggaagtgtcgatcgatcaaggacctgtcttgacaataagctgtccctcgaggaacgtcaatcctgcggatcgattcgaggaagcggtcaagcatacgaggcttttcaatgccgggcgtttggtccagattcacctcatatcgagcgggtagagggggaacacgtcctttggataagaatcgataaagagccctagtcgtactgccagcagttgctagtaccaccagtgtgcagtcgatcgcgggggttgatgatttaggacgctggaaggcagcttagccacttgattgacgaaaggcgcttgccccaagcggcacagactcgccctactggacctcgaatggttgcaaaatcagaccggttctcgtggtacacgagaacaggcggtaagacttagaggaacgtgtcttgaggatagaaggcatgataactcgctctgtgtagcctcgctatcagctggctcgaggattggcctgattaggtcgtgtgctgtcacacatctgatgcatcaaacgtgcaaagccttgggcggcaagtctgatctcatcgatagaggtgccgcactaggcttgaagggcatcgtcgacaagacggtacaatgaatggtgaggttggaggtgaacttgaagagcctcgctttggacaataggatcaacactgcggttagtccgggacgagtgtggcatatcgcgatgaaatgcaaagaaccttgttgacgacctttcgacgtctcgctgagctcccgcttaaggatgaggatcgaggagccgtccgcatgagcgggtccgacgcttgattatcgttcgaagggtttggaacgtcgccggtcaactactgtcgaagactttttgttcatttcgattacactacttgtacagcgggtgatacggaggagagacatatcgtcacccagattgatcaacgaaagcttccgggctctcagcctccccccggtatcggtcacaacggtgtcggtacttcaacgacattgcggtgcagactctagagtggctcgaccccctaggtgagatccgaaacacggtctgatcctcgaacaggggttgaccgctgttgggatagagtttagaaggggggcgttccgttggagcttttcccctgcctgcccttgtatgccttggcccctcgctctgcgctcctctcggctcaccgcagcgatccctattccctgaacccctagtctagccactggccactcactggcactgggtccctctgacttcaaacagattcgcattccccctcatcgatatcgtcgacatcttgacactttcagatgattccttcctgcgtcgactcagtttctagaacggatccgagcaattcattgattggtcgataaccttcacccccactcaccttctccgcccccctttgctgtgtaaggataccgcctgccttggtgagttgggtggtctggcgatagcgaatcggagtgcgagccccttcctcatatatccgtcgagaggccaccgagacgaaagcaaagtccgctcttcgtagcgattacattcaagtcgtaatcctcacaaacaaccatatgtgccatgtcctctcgatcattcgatcagatcgctcgtgtgctgcaaaaacgatggacgttatcttcgttccaaacgcgatcgatcacgattgtcatcatcaattgccttccgccccgtacaatcttgtttaggactactgctgacgccgaatgtgtattatatacagtgctcgcgacccgaaccagcactctcctcccctcttcaagaagctcagttcattcccccccaacgttgtacgcgaataccttatccgacacctctaccctattcggtttcgctccaagataacacttcggaccttcaccaacaacattcgaggccatagttatatgcttgataccccattcacacctctacctctaggacatcacctcacttgcccgaataccatcgaatctcaaacgcctcgtcacgcatcgacccttgttcgaagaggtcggcccacctttccaattgaattatgaacagtgctgttcgtgcgcctaagcaagacaacaccactcaaatggttgccgctacgcagcagcccgtagcttccatcaagcgagaggctagcgatatggctgctcataacctgaccggtaaggccccaacgaaacccaaaagccgtaaaagggtcaatactgccgagaagcgagccagtcacaatgctgtcgagagacagcgcagagagatgcttaacggcaggttcctcgtgagtcccagaattcgagaattatacctagtcaccaaacgcactgctgacatgtatcaaacccacccaggaccttgcgcgcctgttgccgtccttggccaagatccgccgtccttccaaatcggctatcgtcaatggctccattgatcatctcagtctgcagcgcaaccatcgcttgtcggcagctcgcgaattgcgtcgcatgttttccgaaaagcaggagctattggcagaagtcaacgagtggcggggccgcaatggcatgtctcatcgcgagtcgaccggctggaccagagacctagaagaactcctttcagtcgaggccgaggttttcggagagtttaccggcatgggtaacggtgatggtgacggcgatggcgaaggcgaaggcgaaggggatgccgatatcgagggcgaagtgcaggattatcaccttaagcagtccgtcgaggcttccggagtcgagactccaatcgaggcgctccgctctggatccttcgcggacggcatcagcgtggatggctccgcactgcgcagagactcgctgcacccctccctaacaacggacccgtatgcatcgtcatcgttgcactcgtcgctcatgggccccgacgccttctcccaggctagattcacgatgcctgtccgccagaagtcgttcgcccccaccgagctgtcaagcgttttgtccggatcgcctccccaattgacgcaagcgttcggaaacggctcgcccatcgggtcgacccagcatttggcgctccaggctttcttgtctggaggcgacgctttcgcccatggaccgtccctcgagtctcctggaggattatcgggagattgcatcacgcctccgtctcacgacctgcacatcgatgtcaacacgtttgctcccccctcgcctccgacggctgccaccagctttgccagcgccggtactgatcaagacaaggtctcgcaatgggctgcccaacaggtcatgctgcagtatgttcaagacagccaacacatgagcaacgctcggtctggcaagaacgtggcgtcgatggacatcgagttttcgaacccatttccctcgtacaatccggcctcgagactggacgctgctcatcaagcgcttttgactcaccagccccaattggcggctgctgcgttcccgcctccctatgccgatacacttttcggtagcagcggcagtcactcgatcgagtcgtccggtcacggcgatcactttggacctacggcggcggctctggctagcaactctcaattccagcaattctttgctgcgaacccgagcgctgcggcttcgctaaatcctgctctcgacggcatgacgtatggtcagatcgagcaatggtcaagatttgggcaaatcacgtcgcggtctcctcgtcatggcaacaatggcgtcgtgggtcaacctgagaacctggacgatttccgacaagccgttcgcgccggaatcaacatgggtctagcggctggcatggtccgaagcagttgaggtgggacaggcgtgggatgcagcccgtcccctcgacgcgctcactcatccggaccgtaacgatgaacagaccctcttgggaggtaacgcacgatgcacccgcgcgtcgtgcgagatgtttccgtgtttccgtgttgtgaaatgtgtaacgtgagggtgtgtttgtgtgtatgtactttgtggagcgagcgctgtcgacgcgtacgctagtacgtcgtggatctgcgtttcgaccttttcctcatcttgcctggctttcgccgctcctcttgtgtttgttatctttgcgctcatgtcgagcagacctctggattgtatgaatgcgaatcgattgaaaccccatcactctggcgttgttcgattctcggtccgaccaaaccgcacgcgttgcgacacttctgacgcacgttggatgactgactaatggcaccatgatcgatcataagcgcgtcgccctatgactctgcatccggtccgcccgtccctagggaggagggggttgctgctctcggaagcgtcacgagtgcaagcgagacactcaccgctcatcgaaagctacacccctccccgtctgttacaccgacaccgacaccctcactcaatcactcactacagcgacctttccttgtctcgtcgtcacactatcgacatcgcacccccatacatcgcagatagctaagccgagaccggtcattcccctaggtcgaacctgtcgcctatacacgcacacacgcacatacacaaacacgagcctcacaccatcctcgaacggccgatacggctctttcgcaccgcttcggtacagacgtacactctgcaatagatcatcaccggcaggttcgcaatgtatagctgcgcccggacgacgccgacttcaatcgcctgcaaaatcagtctagcttgaaagtcctttccaatccttttctcttcacgtcgagcagggctcacatcacagcaagtcgaggtttcgaccgagacgaaacagatcgacaagtctagacttgacgtaggcggcttctgtcaccggagtcggtccctttccgaaggacgtcccttacatctcgtcgtaccatggccgctgcatctccaacaagacctttggctcaggatcgaggagccagctacatgtccggttcagcctcgacccacacgccttacagcgatggatcagtattcccatggtcagacggaacggaagaagcaggtccaagtggtagacctagctccgtatttaacgcaaaattgtcgtcggggacgagcgtctcagagcatacagctcgacgtgaggggcaagctgggagtagacaggctgcaacttccgaaagcacgtccgataatgacatcagggtacgatcccctggctcgaccgtctcagcagacccatcgcaatccggccgagccaaggggaaacagccgatagacgaggacggatctggccttcgcggtacgatgccagcaaaacacgccgagtcgctggaaccgtccaaacgtcaggccgatcgtttcccaacagctgttgtatcgagtgccaaaatggaacctgaagctcttcgtccgttgaatacatcggcaggcagtagcgacagcccgattgatcatccggagcagcaatctggcaagtcggaggcagtaccgcacatgtccctggtgtcctttccaacgcaggacttgatcaccctggtggcatcgctgttgcagcggatcgcagctgcaaacgacaagttgcgccgcgatcgggtaaaggaaaccgacggcgaccagaaggtttcgccgtcatctcgaccaaaatccgcgcgttcgagtccgccacgcagtccatcgagcaggcctgacccggcggacatggtaattcctccgtttcgtccgaaggcgtctccaagtccaccacagcgtgggatcgaccagataccacaccaacaacagtcgctacaggattcatcttcgggccgcaacgtctttgacccggtccagcagcatgagcaaaccgaagtgtcgatagcatctcacaactctccgaaggacgcgccgacgagcggtgaaccatctcgcgaagtaactccttcaagtgccaagtcaaatggcgattcgtgcgcttccttgtcgacaacttcgcggcagatcaagtggccaagcacgacagctgcggaacatgccgtatcgcacccctcttcgctcctctgctttcatgcgcgtaacgtaccctctatcgggatcgagacctacctacaacggatattgaagtactgtcccgtcacaaacgacgtctttatctcgttgctggtctacttcgatcgcatgagtcggaagctcgcctctcagtcgaccgaggccgacaacctctcttctcatggagatcgggcttcggtaatagaaacgaaaggatttgccatcgacagctacaacgttcatcgccttgtcattgcagggattacgatcagctccaagttccattcggacgtattttacactaattctcgatatgccaaagtatgtgactgctctgtgatacgcagctgtttcttggaaacgatagcttacatgctttccattccttaggtcgggggtctcccccagaccgagctgaaccagctcgagcttcaattcttgttgctaaacgacttccacctgatgatacctctagacgaaatgcaacagtatgccgaccgattgttgcaatatggaggacgagaagacccggcggaaccgacgagcagcgcatagaatcgatgtatgtcggtcatacagacgccgtaagacatatacttatatagacagatcaaacgaactacgggagccatcatgtatcattgggtttctagagccactgccacggactaatacgatgcgaaagataccacgacgtagcaatcgagcaaggtagctcaacaaggtccagcggttcgaggcgttgatctaggcgcctgcgtacggcattgctacagtcagactacctctttggcggcgagcgaccacgtagggttcgcttcgaaggtgtaaagaatgcgcaagcaagcgcgcagagttgcgatttcttgcataatccagaagtatggcaaaaccgcgtttgcgggatctgcgctggatgtcgcgagttgaatgagcaggccatcttcgaaaacatcgatgggtctaaatgacacgcggtcgcctccctggagggtctttgtaatactgccattcgtgaagtccaaatcggtaatagtggcgcactccttccgaaggtcgaggtatccgctggtcgtacagattgtcgggagcctgagttctcgcgtctcgtcggcgttcttcgccgagacgatgagatcgaagtcaagtagaccattgcgcaagtttcggatgtcatcgatatcgatcccaacgactacgtggatgcatcttcgctcgataagtttcgaccgggaaccaggccattcagcaaaacgcattgcgatgtctggaatatcggcggcgtagacacggtcaagaaaggccggaagctcggcatgaacgaagggaaggtcttggtacgatcccgttgaaacgtatcgcagctgaaagtcgcaaagagagctggaagtttgcgccgcatggtgactgagaccttccggcccaggcgaagctcgcggggtcgactccgacacttgttcgatatccaatgcatctcccccgtcactctccagttcgtcaaaatcagtgtgggtgccgtggaagagataagccgagctgctctccctatccttgtgcccgttctggattcgttgagcttgtcgcacgcgcgaccctatagctttggtggagagcggcagatcgaagtatttcgctctcttgtcctcgatggctgcagccttactccgagacaatccctgcctattagcagccacaccgtagtgagactttccagttgttatttgaagtctagcccggtgcgagggatcatgttcaagttcagcgatccattggggcttgcccatatcggagaggttgcaggtaggatcaatcccgatgatgtcgtaaagccgccggtgcacattgtagagtttgggtgtcccaatccccggtgacgcgagtcgcccttgtccgcgatcgttcgcattttgatcgaataagcctttcactacgtcggatatcaacgtattagatcagcgtcgcgctccaggcgaaacacaatcttgagcaggaaactcaccctctgcattcattcttttccgctgtcgtaccacctgaagatgtgaagagacctgttttctggtcatgtgtttgccaagcgccagggtgatgatcaacgcaatgatctcattgcgtccgcacggcttctgcatgaaaatgactttgggtgatgtagctggaggcagatatagttcggcttccaaacgtgaatgggtttcacagtcaatcatttgcttcacaaagctggcgaggactctggtcatagctgacctgctaaaaatgcgaattccgcttcgtctgtccagatgtcttgctttcccgatttgctattgtgattcactgacgcttcttgcgagaggatcgaagagtctgacgattccgattcgcctcgactaccgatacttctcgggccctgtattccgacagaggcgagacgaccctcgaattcatactctttcaacatcgagaacaagccctcaggagtataacgatcttgtagagcgcctttcgaaatctcttttcgagtggtatttccatggagtgattgtttgataagatgtaagctttgcccgctgcctctgccttcgtatcggcctggcccatatcttctggtgcgagcgtcattagacatggtcgtcgtagacttcaaggatttgggtccagacttgagaatatcgtgggctaaaggcgctgattagatggtggaaaagtgtgtatcaagacgattccgtatgagaaagagccgaagataaattgatgacggggtttcgcttttcgtcgcagtctccttgctgtgagagtgacgtgctgctacagtgaggacgagtcgatcaagatgtcttgtctggcgagacgttcatgacgtacggagggaaagagtgagttttaggcgaccaagatagagatgcaatgtttgattcattccaaaggtgccatcaaaatgagacgactggacccttgccccttgacgttgtcgaccgagaagatcgggtgcgctgcgatctcctttttgtcctgaagagatgattggatcccatcaacgatgacgacgatgctgatgatgatacatacgcacacgatcccttcttgtataccacgagagtatggatctgttccaggcaggagagaggggcaggagacagagcgcaggggcgacgatctggtccgatgcgatcaggtgttcctcgaattcgtcgcgttgcgctactttacgccacactttgacgatcccggccacgcgggagtttcttctacgcgaaaacagtcatcccaccgcccccgcccccgctggacgcttgacaaagcaaacaaatagactcgatgtccttccgtttgctcgctcactcgggcactttcccaacgttgtcaagttcccttgaccgcgtcttgtctctggggcacatagtagctagtagcgaccccgtctaaacattggcttctgcggaaacctgtagcgttcagactacttgaatcctgctctctggcactgcttctcacgatgccgctgcaaaccactgataggctcagcttcaacggcaagtcaagagaccgttcgatcacgcttcggaaacatgcccagatcgcagctgaggtgtctttgatgcacatcagatgccatcgaaattatgggcgactttcgtgagtccccccgaaatacctgctgctaaaatcgctaaaagtgattgttttcggaaagtatatcacagttgaggtagcacttagtacaatcctatatttacgcaatctatatcagccgagcatctttacccgggtcaaggcgtacgatgtgcctgtatatcaatgtcgacacccagaagtgcgaggatatatcgccgcttttgttcgctcggctttggatgaaatgcgaaaggtcagtctcggacggctactcctcgtgcgaagcgatatcttatgcgctgcagcttcgccgctcgacagggcaatgccgagagggtcaccctggttatcagctctatcagtacgggagagccactcgagcggtttctcttcgatttggactatatggatctgagcaagtttcgtgacgaggcagacaggtctattgggtatgtgttcccgtttcgatgcgaggctggtagacgcaatgacacagctcaagtggtcacttgcgagaccagacttataggttccccctctcagagcgagatgagactgttgttgcaggctttcctgactcgcctctgtgtcctggaaggacagcttatgatgctcgacccagaaggcgaatacgatgggtccagtacaagtcgaacatgggctaagctttagccattcggatcagacattacttttgccctcctgctgaccatgagagacgacgtggcgccggcgcgtgggggattggacgtcgggttcaagagaggtggtcagccggtgagtgacggaagagtgacccattgccccgctggcgacaccaggctcattcaagttgacaacgggcatgacgccttgttccggaatgcagcatcctcaataccaagatgatcacgcaacatcaaactgggtaccagcaacgaaggagacgtcgacagcacggtcctctgctgacacttcgaccgacctcaacgtatgtgtcctgatggtcttgcttaggctttatgaatgatgattcacatgaactgccttcagcacaccgcctccatccgtgcggtatcatgcatagagaccggtatcgttgatgtgggtcatacggagcctcgctaatcgagcgcagacaggccaatcatgcactctcgaagccgtttgcgtcgaaagctgaagcaattgttttccagctgaacctgttggtccaggaatgcctgaccaaaacgaacaagcgatttcgacctgttctgccatgaaaacgctgatcagggatgtcgcctgttacctttgcttccgctcaagagatcgaattcagatcgatcgagcgatgtaccaacagccgagcaagacagacacttcttctatcttcctatcgccgctaattgtaactacatacttcagtaatcaatgatctacacccgagctggacctttacacaaaggcatactgcatcgattatcatagccaaggcacaaaacatccccttacggactagtccagcttgtgtgacgtaccttggtgatccccgcgtcaaccgcctcgcaccaatcgaccaactgataggtcattgacctgccacaatatggccgctcgctactcagcatctcgttcacgtctactgtttgctacgagtgctgctgtaacatcagcatatggcacgtacagctgttcgactattatctccaacgagtctctgggcgaaaacaggatcgagcaagcgcctgctcgcatcaagagcgctctcaagcagactgtgatcggtggcccgttctccgtttgggtctggggaacgaacaggtaggcttcactccctgaacgacctttagcgtgtcttgtgcctgtcggactcatagctagtgtttaaaaaaaaggaatgacgtcctccaacctcgatcagcaagcgctcctgcgatcaagggcccccgcgttacatcatatattccgtccactcctcttagagaccttgccctacacgagaagtacggtgccgccgtagacattagtggcgacgtttggatgtggggcgctggtcacttcgacgacggtgtgtcggaacaggcggccatcagtctaagaggcaaggtacagttcaaattattcggcgatgcgcaataactgagctgagagttgcaggtatcattgtgcagaacatcacctcccttgcgccgacatcttgcaagctctacgccttatcagcgaagtcgggcgaaatctacggcttctcgacgaaacgctcccgtcagaaaatacctcgacaggcggaacagtacccatggtggatgctaggtttgggttcttggttgcggcaagatcccggcgtggattatatccgtttgattccagctggtggtttacacaaaggggagaagtgagtacaatgccagaggaatgcgacacgcagaactaccaacaccgaaaacaacagattcgtctcgatcgtgtccggcaagagccatatcctcgcgctcacgaacaagggcaggacgttttccatggccagtgatccggacggcaattcccattcacagacaggcgtccgatataatctcccgacaagcgaggaccgagctttcgatgacatccgttggacggatacccttcatcctatcgtgtctctcagttcaatcaacatcgtacaggtcgctgccggattcaagtcgtcttacttccggatggaggatggacgggtgcttggtttgggagcgaacacgttcggccaactgggcctaggcgctctggcaagcgttgaagtggttcctactccaagcgagatagtcttggcacgctcgtatccggcaggcattactgtgaggtgtactaacatcgcagcaggtgagtggtacgaagcacaagattcagaggtctgaagctgattttttcgggggcagggggcaataacgcatactatactgttgaacgcgcttcgacgatcgaccctagtcaaagattcgttgacctattggcggtcggaactgggatctcaggcggtctcgggaatggcctgtggagcagtgcgtctagtaaccctgtaaaagtgaaaaggttcgttatggcagtcgacatcgcaagtcattaggcccatccgctgatgatcgttacgatggtttagcgtgagcggcctccaggaatactctgaagcacttgcgagcttcattccgcttgagattaaagatgtctcggtagcttcttcacctaccgcccacatcttcgctacactcaatacggtcactcaatccgagcaatcgggggttgtagacggcaaatacggcaacgatgtctgtgcctggggagccaacattgactatcagttgggaaacggcaaacgttcgaatctggccgttccgcagcatcttcctccgatgacaggcaaagtcgaccccgactctcgagaagcttctatgacagctggcacagtgggtgctgatcacctctctccacccacaagacagacgctgatcgctttacattcgaaatacagcttactccgatgccccattctcgattgcagttgcatactggacaaggtgatgcgtatgacctgaacggaaaacttctgaagaagaacgtcgaggcagcccaagtcatgtatgctggttacaatgcgagcgcttcctactggcgtgccatctagctgttcccgatgtgaaatgatgtagccatttggtctcgtggtagcttcgtgtaacgctcaggttgtcaagcgtcgtccccgagaatcagcctttcagctttgatgacagctattcgatatagacagatgagggtgcgcgcaccacagcctttcaacacccaactcaccgtccggttcaacttcgtagccattgccaatttcactagcctgcacttgagccttttctccaacccgcacatttgagcacaggattgtactgtcaattttggccctgcatatcgatggatttgataggcatgagcggtatccaccaagccaatcgatgatgagtatgactgacccatctgcgatgttgacgaagtcccaaacgataacattcgataggcgcacgttcttcccaatgacgcagtgtctgccgataagacttttcttgatcgaagtcctctccccaactctcgtcgtggatggaacaagcgagtccgctgaaacttgtgctttgggatcgatattggatgctacagctggttctggatcctgtttgacacgatgcagattctccaggttcggcggcatagatcgaagatactgtaggaacgattggtgtcaattcacgccatcgtttgacagtccatcggatgtcactgacttctcgacaaagagcccagtatccagacacagtgttccctcgaataagcggttcttgagccggagttaaagcaggtcgatctccacctttgcctgttgtctggccgaatggcggcggggcttccacaatcaccatgccgcacgtcatgccacaattgcttgtgttctgcatccctgaccaacggccatctgcttccgctccggtatcaggtcgaaggtcttgtttgaagtcgagtaactgttgaccagcggtgagtttgggtgacgacggggtggtaacattgccggacgttatccgcgagaagtcgtaggtcagcatcgatttgcacgaatcttcgttccgtagccgggaaaccgttgacctctcgaaggcggagagtaatgggtcactagccccgttaagaactgcatgtatgaatacataaattcagctgctcggggagagacctatcttacagcgggagattgcttcactgaccggaatcccatctagcctgcaagccttgctgccatcctcctttaaccaaccaaggcaccaaatcttctctgatactgtctagatccttggcgtctctggtcatcatgagatctaagaccgcctttttgaatacatatgcatgtgcatcttgaagcgaagtcgaaagagtgagggtaggatgcctgtgcgtgaagtattccagttcctcgttcggaagacgcgggaagcggggtgactgactgggcaagcagagacatcctgagtgacaaatcgtcctccatggcttctagaggttgaaccatgagtagctcctcgttgtccttgtcgtaagcaaccaagacggcctcttggccatctgggtctttcagctctagctcgctcttctcataccaaagagaagttacgaggctacctggctggttccggtgtcgactggtcaaggaagaaagcaacaatgagggcggaagagtgagatcgcatggcaatacaataaagtccgactgaagcggaccatcagctactgcgctcttgaaccacaatcagcaaagcttactcggacccagtctctccagcggcgcagtatacgtgcggttcctggcgttccagttcccccaagtccgatcagttcaacgcctcccgccgcgtcgctattcgactcttcatcgacatcgccaagcctgcgtccaagatcggccctgcggatatccccgccacgtccggagggtccagctgcagcggttttgtctagatccagaccattttctgcctcttcgcccctttcggacaatccatggacttcaatgctgaaggctgaatcatgttttgctgcatgtcgggtcgtgttggagttggaagcaccgcgatggagatcgactccggaaatccagcagtttcttacgtgctccgaaagcataggtacttcacgatcaggacacaaaatcaggatatctacatagctaggacatcgttcagcaagcattcaatgcgcaactgagcaggtgtgtagctcaccgcgtatcccagctgcatcgacccatgtcaagacccggtcgatcattacgccattgccgattgggagcaatgctttaggtgtagcgttccccccttgagtcaacggatatagactgaaattgacccgaccacagtccgtccgaagatgttggcatttcgcatggtgcggacactgccaagggttcaactcacgactctccgtagccacaaaatattaccgcctggaaatccgttaggtctgaacgcctgccattgcgagaattgtaatagttgtctgtcaccctgttagaaacgccgaacatcttgaaaatacgctatcttctggtgtctcgaacgtcgggaaagtgtcaaatgcacacatgtgtgggtcgtctggacataatcatggtacaacaggtcacatatcagagagaagcagctaacgatcgcgacatcagcgagatgttgaacgttttcacgtgatttgcacgaatctcaagcttgctcagcgtagatctgacggagtgcagtactttaatttgtgcgaatagtcgaacgctcgcctctgtctgcagactcaccttaatcgttttgtctgcacctccggtgatcagacgtgtacccgtcttgtcgaaagtcgagcagaatacaccctggttccgagtctcgttgtgagctttgccgtcgagtaacgcgctacaaaaacactggcttactgcttcagaatccagactgccactttgagggatatcgttgagatgttggaaaggcttgccagtctcatagtcccagaaagatagtgatccgttgtcacctacgtaagacaatgaggagcgatcagattgatgacggctttgcttgatatgtcgtagaccgagaccgacctcctgagaacagcacgccctcctcgttcacgctgagggtattgataatggcttcgtgacctgggaaattgtgcacaaatgtaccctccggacatttccatttcttgatactgtgacgggcgagagatgagtttgtgaatgtacggcctatgacctgcactgctcacttattgccgcctgcacttgcgctcgcaaagctgtactcgtgcggcgcgattgcgagtgctctgacgcttttcttgtgatgtgtcaaggtcgtcatagtcttgccagccgctagatcccacaaactatcgattgcgagaattatgattgccattcaacagcatcgtttactggctgatcctggcttaccgaactgtgctatccatgctcgctgttacgacttgaggatccgaatcttggcactttacgtccgccacggttgctgtatgcccagaaagggtgaagatgttggatttcgttcgcatatcccaaacctgattcgaccgaagcgcgatcattattcaaggttcgggcggtggctaagccggccttcttgtggctcacccttgctgtagcatcacgaccggcagtaacaaggacgtctagggttggatgcagagacagactatacacgccggacaaatgtccgtggtaatgtctgataaccttattcgcctctagatcccagcatttaaccatctacaggcatatcccggtcgttagcaaagtctttccatagcaagagctgaaagtggcactcaccttgtcttcaccgcagctgaagagatagggatgcctcgatgagacttccaggcctctaaccggggagatatgccccgtcaacgaaagcttcagctctcccgatgccagatcccatatctggatcgaaagaggaaccgctcaatcactaagtctagacgccatcgagatgatcgccgggagctaaccttgatcacgcgatctcctgccccagttgcgaaccattgattgccaggttccacagcaacggaccttacccagccaagatgacccgaaatgacggttttgagtttccctacataatgcgcggactgtcagattttgcatcggatccctcgacaatccgccacgctcacaaggtgcatgatagactggcttagcctcccgctgctcctttttcttcataagcgcttggcttaaccgacttgaagcttgaccaccttcagccgagtatccttgctgatgcctaaacgaggtcaatgcctgggagctactgtcatctcgcttatccgatctttctcgataggtgagcgacgatggcataagcatttttggttgcacgagctataagacgcctttgcccacctgccggattccgttgcatgtcctggtcctcctaacagtttttggcctgtaccagtcaccgatggcgacgacggattcgggcctgcttcagccaggacacccgccgatcgtttcggaccaacggtcgccccatgcttagctgccaacacggggggaagaatctgaacgtccctgtattcacgagcgagcttggacgcggtcttgatcttgctcctgcacgcgatggaaatcatgtcagtaggaagtcctcgctccccatcctcccgccaacttacgccctttcgagtccaccgaggtctgattctccgttctccgtcaggaacacggcccgagtcctcttggtagaaagagcaactaattccgctaggggagtcaaagtacgtccagcggtcgcatcctgcaggctgtcacctggcacggccgggctgatgacactagacatttcggggatgttgtatcaagtatctatcagacctaaagccccttgatacaatacggtaaaggtttgcaattacggtcagagaggcaattgaggataggccccttgccgatctgatggctagctggctagtcagctagtgattctacgattattcggtgaccgaagcacgaagctgtcataaatcatatcgcatagacaagtgatgccaggacggtgaaaacgcataagtcaggttgtttgatcaatctaccagacgcttccgcgtgatttggccttccgaagccccaacacggcaatgccgatcggacacagcgatgatatcatactctccttgctgcgaagactgaaggacgtattttgactcttcgatgccagcaaccgtctgtttatggtcgattcctcaaatgagcaatcgtgcaaatcgacacaagggagcgcttgcgctcgtgcacccacttctgtctcttcgataacgagcttctttccgacccatgttgatcgggaatatgtgctttaaaatcgtcaaatggcaagtggaggcgatgtgcggtttagtcatgtcatagaatacaactttgtttcgacccgttctgactcacaatgcaaagggaggcgtgccacggaaggtaatctcgatatcgatgagatcgcctgaataagtagtgatgtgatgccaagtccaatgagtacccgggagtgtctatgttgtgcgacatttttacacaccctcatgtaaccaagagtctccctcctggatatgggctgaaggcagtggatgtaccgtggctctcatgtcgtccaatcgagtctcgcactgattcggcagagaaattagacgaggcgcgacggtcacgatgatagacgggactttgcttacgtgcgcagcttttcgatgagaaacggagtgcatttcaaagataccggggcgatcagctagtctggagaactcgggcttgtccgtctctatcctgtgtttcttgccgccgaatgtgtaactgacgaagtgcatgccttaatgtctcaagctcgaaggcgtggtcatacctcataccttaatgtccacggtcgtgtacctagatatggggtatccatcaggcttgtcgaggagtggagagcatctgcgactcaccttgcagaagataatgcaaagtttcgccgacgcaataatccactttgggatcgactgccttgattgaggctggttccacaacatcgatgtgggtgactacatcttcgtcctcaggcggttcccaatcacaacctgacgcgtctgccacagagatgatcttgatctcgtaactgcctgtctctcggaagaaatagtccggccggtccagctgccatttcttctgcttgatgtctgatacctccatgatctcgggccgaccccgcctagtgttccggatactcaagcggatatcgaaaggcgcttgtccttgtagttggatgtgtgcctgattttttttgcgagtcaagggatcgtgcaagcaatacgtagtaaccacgctgttaagcattctggcggtgggcctttggaggacggtatggtggatagagaactgcggatgtttggcggagctgcggtcctgaaagtcatatgatcgatccgcgacttgtataatatcgtatgtatgttggccagcttcgctcgaaagatgcaatttggtgcggtagtccaaagcttggcgctcttgggtattctgagcagccttgtgcccgtctcgagtgtgagtgtgctgaaatcggtaccgaaagggcgcttgacctagcaccagacccgcgatttaacaatcgaaatatctcagatgcacatcgctgtgcacatgtatcgacttaccctgcaaggcaaggtcgaccgcgacttgtttgcccgaacatactggatggggatcagattgcagtgtctcctccgctggatcgctaacaagcgcgatctgtggccgtgagatatagtccagctctacctcggcggcctgaagaagcgtccagccaaggcaatgcttatcgcggatctgatcgtgatgtactcaatcgatgctgttaccgccaatgcgcaagccacggcaacttacttcgaggattctatactttcctgccagtctcaattccaagcttgaatcttgctgtgttgagcgatgtgtctgtatctgtcgatctccttcgcgttgatacatgatggtccatggctgttgcaaaatttacttagtgaagtaacgatggtgctgtctgtttgtaagaaatacgtacgggtgtcccggtcaacttgactggtatcttcacagaggaaccctccactatcgaatacagagcattcccggtaggaaattcgaatcggacagtgggctgtgggactgtggtcagcgaaacagcgtcaggttgcatgtctgtctcggaccacgtacgcgagctgttctgacttcataactcaggtggtgatcaggcaatgcgatcatgcatccgtggccatcccaaactcgagtcaatgagatcgagaaacctcctccttcccgtacgagaatagctggagtatcaatcgagatttgcgctttgcccgcgctaccgtacgagtggttcgacgtttctgatagatcggcccagaaaacagtatgctccactatgaagggaggggttccctgggtatggcacgtatatcagtaccgaaaggtcatgtgtacgagttggccatcgcgatgatctgggaccgacctttagagtgaacttgatgtcggtttgattggtctgacaagtccagatgtcctttttaggatgtccccggctatgtgtgtgatccaagtggaattcggcctgaggatgtatcgtctgctcgaaccgagatagcgataccggaatgtccacataattcgagtccgaaatactgtacggctcctatgtatctcgagccgatctcaatgaactttccatgagagcaagagcatactacgtctttcacgtacgaaaatatatctacctggtcgatcaggccgaaccacgatctcttcttgggtcttgtagatgtttgatttggtataggttctgggttgttcatcatgtcggtatgaccggtaatgtacggtataagggggagcaccaccgatgaaatccatgcgagccctgaaccctatctcaccagcgctatgcaggacagaatttcagtccagtccatgatcatggatggtgtctcttcttaccagtcacgctcagcgatgtattctactctggcggtgggaggaggtacctcttttatggtaagcgaggtcaaacctcgaactagaccctgacaacgtccggctgtgacctgatgaagggcatatgttccaggtccggcaacagtgtgcttcaacacatcctgcgatacagatatcttttgagttgttgcgatgtgcttagtgcccggctccggctcgtatgagatctctacgatcgcttctttggcgtttcggtccttattgaccaagatcaccaacgcgactgatgagttttccttcatgagcagatgatccccgctgcgaggtagtggctgatgttggctaaagcttgcagtaggtaagtcttgaacctgatacatcagtctcgcttgatcgatatcagggtggtagatattgtgcaacccatcttcgatcgtaaggatctggacttcgtgtgtcccgggcactgagtgcctcagagcaagcgagacgttgtggttgtgcgatgtggcaacgtcctttgctgtgctcagccgccgcgacgccagactggcactcatgtgtacgtcacgactgattgtctccagtgcggtctcggcgttgacctcccgctggacctcagtgacgttgaattcgatatcgcggatcacgtggtggattggacttctgctttcttcttgttcagtccatcgcacagtcatctgacctgctcctctgatgcgaatgttctctatgtcttcgtcgcctacgcaacgtatagcggcgttggccatacccttcgaggctcgacgctgcggattcaagtcatccgttacgaaaaccccttggcttgggcattccgctacgatagcaggtggcctcgatctaatgcggaagctatactcatcgctatcttgcacccgttctagatcgacaagtccaatttgatagatcggcagataataaaggtgttctgaggattcgatcgttggaggcagcggcgagattttgtctcctgatcgcaccgaacgagcttcttttcctgatacgtcctggggccggtaagagtgtttgtctgttttcacgacatggagtccctcttcgagagccggctgtgctccggataatgtctcctcgtcctgataccatttgcggcgctgatatgctttctctatctcgtgtcgcttagggcgcgcaagcttactagctttgatggtgtaggtgatcggggcagcttctgtttcgtccagggacagcacggaatagtgtattgtactgggttgcgagttattgaagataatgggtatgtagacaggttgtcctgcaccaggcctttccaaacagaaggtccttccggctggattgaggacggcattgctgtccgtgacagcgagattagcgtcaacacacggaatgtgcgaggagcctctgacctacccgttaggaagtatccgaacagaccggtgaccaagcagatgctgctgctccgctaccaccttggacggcttcattgagcgttccgtcaaagtttgaacgttgtccgctgtacccgtcaaaactgaccagggatgaatgagcgatcagctacaacgcacgttgtgggattaggttgtgaacctcacgtttccacacccatccgagcactgtcagcattacacttccgagctatcggaaaaaatcagctcaacgttccgcccgttatgcctgtgctcgaaaacttacgttgatatgcccaaacaggacggcgtcggtaaccaagagcaaagggatgtagcgtgccaaacgagctcggctttgcaaagggcctggaatacggagcgaaccgatggccaggagtagagcaacatccagaaaggaccatttcagaagataggtcgagcctattgcgccttgcctcggtaaacttccagtaaaatattcgtattgtagcgataattgggttgtcatcgaagtcggagtcatagaagccttagtcacgggatctaatacccggagagagagggctaggacatcggtcaacttgtaaacctagaatataggttacgcttccaggagttaggtttcggactatctgctcaacaaacggcatggacccacctgcgaggcaccgagcaaagcgagcgcatacagctgctggtccgacgagggtaaccatgcttctggtatccgtggacgtcgaactgggatcgacatcttgcctagggtctcagtgatatctgctcaggacccgaaagacaagaccttttcggtgaaaagatatcttgcggttactatggcttccaacactttcggtttagttccaacctggcaggccaaaatccagaaacgcaggtgagccagctcggttctgtctttttcgaacccttccaatcttccagcgtaggtaggatgatactagtctgttggctattgggaagccaaacttcaatgatttaaggctagcaataaaatagcagcataccaactttgcttttctgccgttatgcggcgcatattacaagtatcactgcatgacgtttacattttacgggatttacttccggcatcgactgacacgatcgactgctgattttgatcggatgtaaaacggcttcagctccttgcctgcatatcctacgtatatcttgcaccttgaacgttgaaacatgagcctcgcgactacaaacctcaccctcttgaggctcagctgcctagcgaatgattgaatcaatcacgatatccatcagtcactgggaacaaagctttgatcctggccacggcccctgtgctctaagcaacatcgtgctttgaaccctcgcgttcgctagctggacaaaaggtgtcgtccttccatccgaaggtcgcctctcaaattcagatcccgacggtgctcaaacgcccaacctgatgaaatagtcggtcggctttttacacgttgaaggagagactggcaagatatagaccggttggacaaggcaatggatctacaaacatccaggccggctagcttcgacgcatccagcgcagcagctgatcctgaccatgaagaggatgaatggggctacggtccgaacgaagttgggggagtttggaacgaggcctccgagtcggccttgaacccccacaacctaacgagctggaaggctagcgccagcatgcatcaggatgcgcaggtagatcaaattggcggcgggttgaggccattttccagtaggtcatgttcgctttggcggccttctggaggccgttcaattaatcggttacgccacagatatatctgcagtcatcgcactgcctagtgcggcacctgccccacttcggccatcccggaagccgttgcccgggagaatgtttggcactcaattatttgccaagccaccgtcagggtcttattattcgacatacttggatagcctcaacggatccaagtcttcacatcaagaatcctcggattccctttggcaaaactatctagacgcagctgcagactcgggctccactgcaaagaagaagaagtccgatgacgataattcgcgcgcttccacaagcgagcctccgcttgtcaacacagctgtggtgccttccatgttcttccgggaagatttcgatttagggaatcccctgatctgggaaggcttgagtacgtcgagtattctagatgctcttccaaccgagaacgcgactacaatacatctgctatcggaccatctggacctccttgagacacgtctggtgcaagaggtatcagagagagcgcccatgttcttttctgccctaaccaatctacaaaatctcacgtctcaagcagcagcttgcctggcgcagatcgcgcgcttgcagaatatcctcgaggatctcgattcctccattccgcgtctaggactcctttgttccgaggcacaatatagcctagagcaatgcaggcagacgtcattcggcctcaacgctgtacaaatggccgttgattcggtggatttggccaggcgattaggccagaatcatgactggactggggcacttgaagctttgagcgaactgctacaatggcatgtgctatacgacgggcaagtgcatggagagaacccggccggatcaaggggaaatactgtccgagagattgggactggtgattctttaccaagcttgtccgatattactgaggagacagacgaaacccttctcacctcaagctacatgtcaccccttatccccgcccgggtgccggcggctgtgatgtcgcttgcgcttgcatctttgccatctatacaagctatgttccatggcttggagcccttggtcgcaggcatgcgaaacgagatcaagatcaacatatccgagatgtttcggaccatgctggagcatcagcatgcgccgttggagcaaaatcaaagctctgcgggcgagacacatacccgaggcttgcgttttcaaccgattttccgggccttccaccggtgcggcggtgcatttggcgaggttgtggcattatggcgagtagcttccatgcaagccgtgcgggaagcaatgcgtaaagtgagtcagttcggaagctttgtcatgaatccaatctcaaaaccagatcattacagcatttacaatctgaagaagtgctgccagaggatgaaattgatccagccattgagtccaagaggtgaatgacatcgcttcttataaacaaaacaggcagctttaacggtgtgacacacagtaccaatctcggtctagcgcttaaatcgcttgggcaccaagcattcgttgaggtttgtggccggatatatgagtctttgatccttacccttcgtgtcatacgggaggacagccagactctgttgcaccagctgcgcacagtgtaagtcgcagatcatccggaagccgggacattactacagtacaaatttcgccgatcatcccgcaggctctctgcaagtagcgaagacgctgacatgtcgctcagtcaaatcctcacttcggtgccacatgatgatattactgagctggatgggatattgcagactgcgttgttagacagttgcgtcctcgcgaatgctagggccgccaaaatgctcgcagtccggaatgccacccatgccgacctaagtcgtgaagagttcgccagagtcatctcacaaagtcgcgacttcattgtggagagcgaaatcatagcgggtcaaatgatatcgcctctgagaggcgcacttgctgctcaggtaagcagatgaaggcgcggagaggggcaataatataaactgaaacaatgcgcaggctagaatcttcttggcagccttccataacaacaggctgcaaacagcggcaaaagatgtcgaagaggagcaatggtcgcaggccgatgtcccgctatccacttgtcgagatataaactcgctcgtcctatcggcgacccgacaacctttggacgaatcgtccagctctacgcaggatcagattgatccgaatgatatggcctcagtcaacccagcgactacggccagatcactcgatatcgaaaaccagacctttgttctggttcctgccacgataagaacattagactcgctgtgctcatacatgaagctactgcttgatctcgacagtatcgccacggacgtcatggcgaaaattgtcgaatttctcaaggtcagtagtaccacagagtgaaaaactaggcagagtatgtcctcagcacccatctcccgatcggccaggcttttaattcgagaacatgtcaagtcgtactgggtgccggtgccatgagatcggccggattgaagaacatcactgccaagcatctaggtgcgctacgagtcacccagcccgggtcgaacatctctcgctgatatattacctgcagccctcgcctcgcagtcgctctcggtgatgattacattgataccttacgtccgagaatgcatacgacgtcatctcaacaacaagcaagctatcatgcttgtcgaattcgacaagctcagacgagtcagtcaagtcacatcctggtcatatgctccgatcacgttacgcttacgcgacaacgagatcaggatttccaagaacatcagtacgaggtccattccaagctggtcgcgataatggcagaccgcttgcagatacatgtggctacgatgaaggcgagtaagctgtttatggtacggcaacgatcccacttataggctgagccatctacaggccatcgattgggaatccacatcgccaagcaatgtgaatggatatgcagagctgctcgtcaaagaatccacgaccctacataaagtcctttcgaaatatatggctacgccgaccgtaaacggaattatgctccaggttgtggaggccattcgccaacgtgtcggtcctgtattcggtcaagtcgagttccgcactgacgtagctaagcgaaggtcagtatttatgaccggcttcgatgagttcaggattgacgtcgcctttacgtactagaatggaagcagatgccgtgttcctgtcggatggtctgagcaagctgactggagaagatatgccctcgccagtttacgatttgcccacactcgttagagcgaaggctgttcccaggaagccgacgcaagtgggagcttccatcaatcactttctgcgaagagatatccgcccgaggacagcgaaggtcaattctgatattcctgcagaaggcgctcgagaagcagataatcctatgcttcagggcaacgggatagtctcaggcagacagctcgcagacgatactggtccctcgcctgctcctacctccagtcccttggagctgtctgaagaagcctctgtcctcgagaagccgccattgacgtccagtcctgacatacctataggcgaacatcagccagacaacccgctcaaccctatagacatggaagaaggcaccgattacttttcgttgttgggacttacgccggccgcagacgatgacgaaatcaagaaggcgtaccgaaggctgatgattcaggttggttcgaatgaggacttaagccaagtatgtcattagctcaggagagggtgacattgcacattgcagcttcatcctgataaacaaatcgttggggcaagaaaggaacctttggacaggcagactcgcccggatggctcgaacggtgatcgtttacagcaagtcttagaagcatatcgcgtcctctcggatcctgctgctcgtctcgattatgttaccaagatatcgcggagtgagtgcacctcctgttgtgagaatgaaccgagactgttccctgacttttcatacgcttccaggaaagggtctaataccccatgccagtcttgtcaagctcgcgaccagggagctatctctggacgacttcgaatatcacgagtcggcggtccctgaaactccagcatactacacccatccgtgccgatgcagtcatgagctgctaatcacggaagacgatcttgaaagtgggcacgatctcatagattgtgtaggatgtggcgagcgcgtcggtgtacggtatgaacgggcaggtgaagaaggcagcgttgggtagactgccttgtcaagcggcaattcatacgagctgtagctcattacgcgttcccattggggatggcagggcgagcaacaaggatggtgataccccactttgccaattcgtgttgtcccataaatgatgtcttcgcttggtgttcatatccttttgagctcgtgaggtatcagctaatgtgactgtgcttttttatctcatatttgctgatcagtcctggatgtgatatctttatagccgtcggtaataaaaagattccgtggactactatagacatctgtgatgagagtttgaattgcacgtgggaagtatcaggaagaccgccataaaggaccgtaaagcttggtaagatgcatgcaaggtcttcaaggtaattgcccgtcaatcttgtgacctgatctcttataacaatttttgtcaagagatgtgatattgtcacagggcaagttcggacgttaacgtcaggagcacacacaacaacatggtgacggcatcaagcctagactgggagcaccggaacgtggacaggcagggcgcgggccgcagcaaactccacaggctgttgcgcaagggcggtactgtgcgtaatgatgcagaatggcgcaaaagcaacgtatcactaccatcgacacaacgcatattcaatatcactaccttcggagaacaatagcgatatcgacggatattcaacaaagaccttgtagctcaacaacctactacatcaaacaaagacatctgactcagcaaacaagggttctcctgagattatgtgcctgactctcgactcccactttggctctttgtcccggattcgccttatccgcctattgtcctcaacttgcgataccactctcgttttcgtatatatacttagtagaacttgaccgaatccggcagacgacgttcttgtactaggaaggtcaagttccaatatcgcattctatttatgcctactgatttgcaacagcaccgcatcttcaagacgtattgtgacgaggttacaatccaggacactcgctaagtagtagacgtctcaccgttcgtactgaacaagctttcgatcctagctacctatagcgacattacttccttatccgtacatcaacccggatttgtatcatcccaaccgaattcgcttccattaaccgaactcagcttcactcctgttgtgactacctacaatccgtgccgacattgcactcagatattcattagacgcgacttagcgaagctccgccgtaacaatatgatcagccaaggtgacatcaacatcccagtctacaagacaggtgcaggaggaaccttgagggcattcaagttgccactcaggaaggactactacagtcaagctgaacagcaagaagatgctgtatcagagcgtatggaggagaacaaggcagaggctgcctacctcacggtccaagacaaggacaccatacaaggatggcacaacagactaggacatatgggtgtcagtaccatcaagaagcttgcaacatcaggacagttgcatatcacagacaaggatacgtctaccttcaagatggaagagtgtgaagtctgtgctattgcaaagacaaccaggcttacctttggtgacatctcagtggcagctcaagagccattagagattgtgcactcagatatagctggacccctcaagccagacatcaatgggcacatctactatgtgacctttgttgatgacttgacagggctgacctgcattggaggtctcaagacggagacagcaacggatgtccttggatgcttcaagaacttcaagaggatatcagaattggctttcaaccggaaagtgcaatgtctgagaacagatggtggaggagagtatctaggaggcatgaagccatatttgcagctacaaggcatagttcaccaggtcaccacaccatacacacctaagctcaatggtacagcagagagggcaaacagaacactcaaggagatgtgctctagcatgctcattgctgccaagatgaatcacaagtggtggttctatgccatgaactatgcttgcaccctcatcaatatgggcaagcaatatcaagggagatctctcaaggagatcatgtggaagcacaagccaggctatggccaactccactcctttggcacagagtgttgggtcagagtgcccaaggagggtagactccagaacgatctcaccaccaacaaagcaatcaagggaaagttgctgcatccaaacatcactggagcaggctacttggttgtcatacaacaagaaggcagagatgtcaccctcacaagcagggatgtagtgttcaggaggccagagggagctagtgatcccgtcactaccagcccactggaaacacagcaagaaggacattttcctgacaagcagtacacgggtaccaaaggacctgtgactgaggatcttccacaggatgaagaggatcaacaggagcagagggagagacaaacaacttctccacctgcagttcaagataatccacctgcaacggattacagagaaccttcccctcagatagaagaatcagaggaagaagaagactctgatgatgaggatcccatgttgctcaaacccagggcagacatcaggagaagatcacccagactgttaagggcgggtcgatcgggcgaactacgcggaatcgaatctcgactgcggaagcagatgccgagcgcggatgtaaataactggagtcgtaggtcgttgacgttccgatgatcgtagggatttgacgtccgttgtttgtcgataaacgttgaggacagagtcacgaaggatctgtatggctgcagatggttctatggggtgctccagggtcttatcggtcaagtggagtcgataaggggcgagtagaagcaatactcgaagggtgcgaaggtcataagcgtagtctcgtcgatctagcctcccgtagatggataacctctccactaatactcgtgttcggtaggtgtaactctcggtactaatgaatgcaatattggcgcttaacctctcttctactacaagtattctcgacagggatcggtcgagaatcgtcgacacttatatagtcgttcggtcaagcgtataaagtgaaaatgagtcgtacgagtcgaataatcggaaaggagcggagaataatcgtatagcaagtgtccgtgcgcagtcaggggtctccgagttatgtcccgaggtttcagggtgtaacctgtcgagttgtacgagcgtatgttgataaggtttgtatattgaatgatgaaacgaggaggtggtcggcattcgccgaggatcgtgtttttccgtcgtttgtcggacgataacggccggtaatcggtggtctgtcccgggccggtgtaagtagatgatccgaggtttgtcggtgactgccggtcgataatcgctgacaacagtcgatgttcagatgtgtaagtgatttgatcgtaggtgtcgtatatcgaggtagtcgttcgaatatgctattgtttacgttgtcgatatttgtatccgcacgtgtgtggttgcgcgcgcgctgaatccgcggatgagggtctactccgtaacacctccaccccttcggtgccgtcatgtctacctctctacctgcaagcgcatgatatccttggccatggaccagaataaaggcttggagaatggttgaggctacttctgtttatatcatatttttggccatccacctgtgagcattgctgaacactcccccttcgtggcacaaacattcagcagacttctagggttttggaacaactaatcccaggaatagacttcagtgagcttgttatagcaagaaaggttcggagggcagggcaggcaatggatgacaggaagttggcacaatcgggttgaagatcgggcgtgcacccactgctatcgtggtggagtctcggcgttttgatcttgtgccgctttgggtatccaagggaactggcaatgaccttgtaatccgaatgatcgaggagaaagacattgtcatagacctcacagagaccgtccgatccgtaagcagtatcctgtccagatagtaccgaattcatatttattgtcggtgtagttgacgttactacaataacagcgatttcggcactgctacgcaccccgtagctcacagtgcgcagcctttacatgttccgtctaacggaagagacaatcggactattaagacgtacgcaagcgggacgttcaagctatcgttctgcctcgtcccattgcccgcttttcagctgctgaaactcgctcacggttgatctcgtttctcgtcatccactagatatgaatcgatgcccaaagctggttgctgtttggaagtgtcggtcgacctctgaatctctgaagacattctccaccagctgatgtaaatgctaagtcatactcatcgggtcgacgaactagtgatgggctgatgtgcccgccaagacctccatgcaaaatctccatcgccaatagccgtactcgggatccgctctccttcactctcccgagaatatgaacctctcgatgtaggtccttttccctatcatttgccgattttgaataggagaccatcttgatcaagcgtttccgaccggcagctccaatgatgccgtttgagctcgatcaaaatcgatgatattccgatttcacctttcgtcacgtctggtctggctcggtatcttgccagatgttgcttttactagtcagtcatttgcatattcggctcagtttgtatgaagagtccccttaaactattattgtcttaatctggagacaaccagaactaccttaagccaccggcagctcaaatggaccaaggtaaacatgccgactcacttctcgatatacagcgcgcccctcttatcagaccgctactggtcagggaccaccctgcaccctgctgtcgtgtgcagcgttcaggatcaaacgagcttcaatcctccatccgtgaagaccttggtaacagcagaagacacggctcgcttcgtgtcccgggcgttgctattgctcttcgatgccaagaggctgatgacaacgcaagatccaacgaatacagcactaaagcagatatagtcattgagcttggcgagtgaaaggatggcatcgatgaaacaaagagggactggctactcacaatctatagaacgtcgcccgagacagttgcttctcctcatccgaagtccgggcgctcgcaaagatcgctattatcgtcaggacagcttcgtcaggatagacacgacgcacgtcgggtgagcaaattcttacagcgaaggttgggaagtttacccatcctggtcgggctgcccggtagtgtagcactcccgaagctggagtgaggctatcttgctttgactaacccgtcaaacggtctggttttatgcgttcgcttgtcgagcttgttcgtgggtcgatcagcctctagcgagtaatggtacgggatcgcgtcacgtgaccaggctgcctccaccgctcgcatccgacctaatttcgaagcagctcgctacagttgctatgctatctgacatatctaagcagatagatacgacaattcccccagtagtctcttctctagatttcctctcctaaccgtattatcggcaagaattggtaccagccatgtcggagtctttgaaacggaaaagaggcgctcaggactttgttccgatcgagggcaaatcttcgaacgtgaagcctactaggatttgttcaaccgggaaagacgccaaagctgcgatcgaatcaagcagtaaagatggtacgctaatagggttgtaggatcccctgagaggctgcagctaatgagatcgtaacattagctatcgttgccctggagaagcaaatacgagtgcctcactcgcaacaatcgacggtcgggttgacccatcccagcgttgtactgatgcagcaatacctggcactgtcaccgaaatgtgatgaggtgctcatgaattggaaacacggaagcgaggtaggtacccaaactcccaagttgaattcgttagaggcttacctcggcatgtttcgatctcatagcgtaaaaacacgcagctggtcgaaatctccatccagcttctcacaacaataatcaacctgctcgtcccggtcccttactttcgaccaacattgcagaacttggtggagaagtttctcgatacctccgagaactacggcaatatggtaagagcgcgattgaggccgcttgtcatctcgctctactgatcacgctgctggctccttccagctcacccggatgattctctcaactaaacgagaacacgctcatcttggcatgggtcttgctgctgctctcgttcatgtcgatcctggattcaagggcgttgttagccgtatcaatgggagaatgtggactatgatagctgacagcgggtgtctccgagcgctgccgaaactactcagcatgcgccgaaaaggaggatttgctgctcaggctgatcctctagacaaacctggtaagctcatagagcgctccgcgaatcaaagatgcatccactgacgaacgttgctgcgatcagatattcgccatcttacgatacactttctcctgccattcctcgcctaccctcttttcctctctggttcgaaacctatggtcattccccttttctccaacctcaaggatgatcccgctcgtacaatctatcgagtcttggacgctatttgggacgctatcaattcgtctccatcgggcgccgtcaaccgcaaaacatcggtggcacttctgcacgagaattcaatcgacgggatcgtcaaactatacaagcgagatggtagcgatgacgaggacgacaaggtgaacgaagtttcgccagctgagatggcgcatcaattcctcttgaagacctgcaccaaaccgggcgtcggtgtatgtttccaagatcaaggctggtacaagcggaagggcaaaggaaaagccgatgacctgcacttggtggaggcggatctcgatggcggcgaagacggtggcaaccagaaggatggaagcgcttacggaaccaagatgttgcacaatcacatcctgggtaacgtggtacgacgaatcggacctcgagctgtcgaagaacccaagattgccgaactggtttattcaattctcggatcgtgtccagagttggtcgccagtttctggccacactctggaatttccgtcgatcctcgtctatcggcaaagtggctggctactatggctctgctcggtcatgtcatttcgctcccattgccctcagaagaaacgtttcacgtcaacaccggtatctccgcatcggacggtggcaaggagatggtggccaaagccacgccacctgcgctgcaagtcattattgaagctgttttgccatcgccgttgtcgaaacaacatctcagtaagggtttgcagcatagcgtgggcttggtccagcacgagaccgccctaaccctagcacgggcgctgcagaaactcttgattgtcaaggctgcattcaccaagatcagcaaggaagtaaggtccgacatgggcaacgatcaattcgacgattcctggtcgaaatgtctacgagaactcgaaatggaagcgcgcaagcgagtgccagaggtaccggtcattatcgcctttgctcagaagtcggctgcctctcaagctcttcaggcttcccttgaagaagcagacgaaggggagaaagccaaggccgtgctgcttaccgagtcggcgctccgtctcttcaggctgtactaccgtgcattgcccaatatggcggcagaattccgtttcgatgtcggcaagttgttggtttcttcatccagcgccaagcaggaagctgccgcccgcaagatggcccgcgaaggcagtgtcatcgacgacaccgggagtgtcgccagtttcggaaccgttggtagtgccgggatgggcggtggcttcggccaatcgaggggtgatgtggcggaattcgatgctctgagtcaggttcacgtcctagaactgctggcatcggtacgggagtgggattggacggctaaagcaggtaagcagccctgcaaaccgaccggatcctagccaagcacaaaactcatgcttgatgtgtcgggccttgtgaacagctggatctgcatactcctatgtataccatatcctacagctgaggctatctactccccatcttcgcacggtccaggttacggaaaagctgttagcggaaatgatagggcaatcaatcatgttcgaccatgatcgcagtgaatggagtctctggatggactgcttaccgcgcactcgagctctcggcatcaaaacatctgcagctctcgccttggaaaggctgcatctgcttggcttcatcgacgactgcgttagaaggtgcatgaaaacaccatatcggtatatcgaagaatccgcaagtctggcggcaaagcatcctgtcaatatcgacagatcgagctggtcatcacctctactattcgctatgttcgaacaattccaggcgaagctagctgggcatcacattgcagcggatgcggctgaggtagttctcgtctatcttcgcaatgtgatcctcgcgatgaccgccaagcaagccgacccaggctttgtccggcttcttcaagcacggttacagacttgtttatccgctgcggagctcaagcgcgaaacaacactgccagtacttgcagctcagctacaggtactttcgactcaactcgacgcctttggaggagagcacaacaccgccactccaaaagtgactttcaaggatgttgaaggttagtctagtctgtatggccgggtacctgtcgcagtcatgtctgatctcctgccatcccgcgcaatcttcacaggtgaggacgcagccgaaaacctgcgaaggcaggttctcgccgctccgccttgcggcgcttcgaacctttggaatatcctccttggtagtggtgccgagcgcgaggtcattgtacagtaagcttcacgcttggggcaaatgcctgttacactaaacactgacacgattggggatagaatcgtctcggtcacaccattcgctgtcttactagcgaatctgaacgacgaggtggacacgtctatggcattcgacctgcttcgtgatgcttgcttgcttcttgaatccaatgaggatcgatcattgcaattcagctgcatgctcaatcgcctggctggattcagcggttcgactgctctgaccggccataccctggaattacttgttgcacacctagaagtcacgcaaggaagcgactcttcaagccgatcaaccaaaatcagacagctggtcacgactcccgccatacaggcagtcatgttgagccgagatccgaggattcggaagagtaagttgagcggcataaaatcgttcatggcgcgttcatggcgcaaggctcaaagcgttttctcactcgttctagacctgactctggctctgcgcaacacaacatcctctgacaccgagacgatcacgcaagtcgcggagcaagctggcaacttgttcctcggtatgaatgcttcagaacaagctgttcatggtcgcgcttttgccatctggaccaagtttttgccaagcagccggatcgagcaaatctttgctagtcttgcgagagccaagataggtcatcgcgaccaaattcatctgcttgccaggctcttgcaacataacagatcactgagcctcgtcatggaatatctgggattcatcttgacgcacaaactgcagctgcccgcgctcgaaggtgtcagggagcttggcgcgttctttggctctgggcgggctataggtggacgacatatcgaggagtccgttcgctttgccaacatcgctgccaggctcaatctggatgggatcgatcttgtccggctgtcaccgtccggtctacgccttgtcaaattctgtgccaactcaagcgtaaatggtacggaaacccttactgctgcaatggagacgatacattggacgtccggctcgctcggaagactgcggcctttgtaccaggaagcagatctcgaggcgatcgaatcgtctcgccccggcttcctctcgctcgtggctgaatccgctcttgctgacacggctgaggatgccgatgtcttcttcgccaacactgaaagccttttgctcgatcgagtacacagggacaagcgactagtcggcagcattctgggacttctgagggagaatcggatagctttcacctccaagaagatcgaggtactccgtcttctgtcgcagtcggcgaatgacgtattgtctgccaagttgatattggaggcggctgtacagtggcttacaccgcaattggcacatgacaccggattgtcagctacaacttcatgtaccttgcaagctttaggcgagtattctcggcgtcttctggcagggttcgcagctgataccgttatgtccacagagcaattcgtgcgatccacggatgttgagattgccggacacctagtagagccgctcctcgcggctgtcattcaggaccgtatccacactccggcggctgtctcattggcagcggcactctgcgagaaatccccgatcaaggtaaaccacgataaatggcattggaagtgtgcttagctgatcagtaaaacctgacaggcgatgatcgtccgacaacacttgcaactgctcctcaacgttgaaaggctcaataaagctatgcaacaagacccaatcgttgcacgccgatctgttgcaaagcttgcgttggctttgttcaactcgtcaccctactcggcttgtcaggcttcgtttatcgaacctttggtccgcctatataagggtaccttggacccggccgacatcgacttgatgtccatttgcggtctgtacgaacggtacaagagggtctctctgtcgaaagctatcgtcgcgctctggacaccgcaattgaacatggcggctgacgagaatgacacccctttggacgcaattaaacaactggatccgcggaatgtgtttgccacttgcattgcgttcgagcgtcaggcggatcaatcgggccccagtcagctttacgactctcgcttcgttttgagcttgaccgcggcttgtttacgggaaggacctctcactggcctccaatgggtcgagatcttgagaagcaacgtcctggctctagcatcgtgtgctttgtcctccaggtcctcggaacagcgaagtatggctggtacggtcttggcagcggcggttgaaatggtgcaggtgaatatagttcggccatgattggtagccgaccaagtgatctaactcttcgatcaacagactacgccgttccaagaacaaccagctctcaaacggttactcagccttttgcgacacggcacctctgtcggtgaagatggagtcatggaaaggttacccttcatgatggctctattctttgcgcatgccttgaggacaattggcgaaccttcgtcctatctctaccccttgatcagcgctttcttactgcgacgaccgataatggacttcagggacgtgccgatgttgtacgacctgctttacgctgcgggtcaaggctctaagagggaacgaaggtggatggtcaggttcattagagattcagttaggtctcgatcggtgagtccgatgagcaagagtttcggtccgtagcctgtcggccagcactgacttgctcgtctcattacaggactggcaaatttgcaagcgtcgtcataccttcgcgctgttagcgtccattttccagtccacaaccgattacaacttccgcgctctcatcattcaggctcttcagactatgacagccgttcccgaagccgccatccacctcgccgaaaaggaagggttggtcgagtggcttgagatgtcttgcttgagcgacatatcgcttggcaagggagccgcaatcgaggacgtggtcctgattctggagaatgtcgttgcggctctcgtccagagggatatgtccaagtccaccaaggtattcgaaagggaacgacggtggcacatacagctactaggttgcatatatcgactcgcacccgttcgaggtgagtttccaggaattgccttcctcgaacgccatagctggatgttgacctagcccagcctcaatcgcagactttaccatcctgcgaagattgagcgaaatggttcttcgcatatccttgactacccgatcagccgttgcggcccggacgctcattgttctcactaagaaccttcgtgagcttgatcttgagcatactgccgtactggatcacgaggaatggcaagtggccgtagagtcattactccgagcgggaatggcgtgggatcccgaaaccctgagtacaagcgaaaagatggctgccgtacagagcttggccctgctctcttgccgcgtcgcagtttgtcatggacctctaggagattgggtccgacaggagacaaaggccatggccgtattgtagcaagattctcagcagctggtagcagatgattacctttagcattccagtatcaatcatctgattggctcagtcttttttccttctttgtctttccggtttcctttgttctcatcatgcgtatcgatttgactttcctttgaaacgcgtcgaccatcaaggagaaagggattcgatcacaacaacaaccatagatgtcaaagcgagatgtagagccggcaacttggatatgccaattgtgtgtacccatatgctagatgtattacgctctgcactctgttgagcacgattggactcgtccgttatatcaaccgatcatctgcgaatacaaccccgtaggagtgcacgcggaagcgatcggtccaccttctttttcgcgtttcaatagccaggcggggtcaatgtcatcaaatgtcaagatgatggatttattcaggataccgtcgattaagaggaggaagcggagagatacaatcacaacgactccgtcacctcagcttcgagcgtctacatctcttcctgagctcaaaaacacgactcagcccttcttcattcccaacgatgcttttgatcttgctagactccgagcaactgcgaagaccgctctttgcgcggaggacaagacgtcctcgaatcggccccagtcgtctcgccataattcagctccctttccaagaggtcagccggacacgaacgactcgcattcgcctttcgagcgaatacggccgatatccagtgccacgaggcgttcgtccacgttcagtaataccaggcgaagcggaagcgagcaggatcgtctaatccatctcggtaagcggctagtgtaccttcattcataactatatcactgatagtggtaagcaacgaacagtactgtatctgatcgacccggtctcgatactgtcgaaagcggaagcaacagaatcaagttacgctgttttcgatttcgtgagcgaggcgtccagcgaagccgcggacgcgtggaagccacagctgcgccatgaggacgtagcggccgtgagtatattgaaagaaagacgggttgcgcttgatgaactgaaatttggtgaggttcatctgggtgtccatgttagatatctcggctttcaagtcgcaccaccgtcatgcctgtgatatcgagggccgacacgctcacgctgtctgagcgagctgtcgtcaaagaggctgttcggcgggaccttctggctgccggacttggtgaaagcctggcggtctttgatacccttgctgagccagagtcatgcctttcaggtgctatacagcaaccgtctcctgacgccagagcttcaggagcactcccacgggaagccgaccgaacgtcagaaggaaatatgcaaagcaaggctctcccgagagctttgccggtgttctgcttcaacggagactttggggcagacaagtccttacataccgccttcgctgcaagcggaaagcactccagccaatctagtctgtgtcatactcggggatatgcttggggtgagctggatattcttgacccggaagtagccgatactgctatggtatactcgtctttgttgtccaaagacttcgtaaatgtgagttgccgatttcctggtatttccctcgtgcttggaaacgctgatgattgggtgctcggcacacgaaaggctctaatcgataggaccagagacgagctgtatgaggactatcggacggagcagctcgcggtgctttgaacgatccaaggggtacacacgaggtataccagtgacgttcttgcgcacggtacgctgtgatgtaaggttcaaaaacctcaccgtccagacttgtaaacatattcagaatcagatggcatgtcgacaaactggttacatgtttctcgacaaggttgagttgtatgattgagaagagcgtgacgggtcaccgactcgtggtttgcgagttccagtcaccggccgatcagattgtatccggcattcgctaaacgttcaagcaacaatcgcaatgagtccctcgccgtgaccagcaaaaccactaatacttccatctcagcttatgtgaactctggagcacgaggtcgagcgacgtccagcagcagacaggcaggtttcttttgttgtcaacattcccgcgcagttctagacaacgcaaccagttctccgtgatattgacgctgtcgaaaggggttcaggtcgaacgcaaacatggttgtgggacagcctgatccgctcgggatcgccaccgcggatcttgacgtcactgcttgtttaccgctcgtcaccgaaagaacacagtacagcatccccgttgtaactgacaaggcctgacttcagatcaacgatatgattgtcagcgagatgattgaccgaatcgtgacctgaagattggacatgatactagcactccataccagcagaagtttgtcccagtctcagccttgtgccgcgaagaacaagatgctctcgatgcttctcgactcaggccggatcatccgggatctaccaaagacaggctacagaaacttcacagcacccctcgacaattggaaccgcagagggactttaggtcggccactccaaaacatggggcgcaccaacagcataccgggggttgttcagtcaatccgtttgtcgacagtcatcagctggtccgtccgagtaacgtagtaccgtactcgcactcgagcacgccatttcgtccggaggagagctgtacgttgcattcggatcggagagggcattatcagatacttacctcggttggtgaacattaattttacgagcatcttagtcttggccgatacaatgatccgaatcacagtcttcaacctggactggaccatcctctggaccgagagtttcctcgtgaacgtgtacctgtttcgcatcgagaaaatcgtcttcccatgcagagcttccggcctccccgaccagactgatcgctcctcgaaataggaacgccttctgtcgaaattcgaggagaacaagggatgtacgacactcgctacgtgaagcatttttgaagaagttggcgaaaatgttcgagagcggacagtcaaggaacgcgttaatagcagcccttcagacgcaacccgtagtagcagcatttgccttccggggcgcgcaagccagacgagtcaatgatccggcacacgtcgaaagcacaaagcaaggcaataggaggcttctggagccagcaatatggtcggatttgaagcattatccacttggagaccgagctattgtacgtgctcgcgcttttctcgatcgtcgttctttagacaggaaatacgatgagcgagcgaagtggggggacagactcgcaagatcgggattacgcctacgagttccgacaatactgaccagttgcgctgaaaaatccgggatcgtcgttaagctgaagtacttgcagactttcgagaaagtcctacgccgacctggtcgtgacaagaacgtatcatggtctgcgtaagcgcgtatgtcaataatgtttcagcttctcggggaggggaatcgccgtacccatcaatcgaataccgatgatacaaagccgccgagccgaaccctctcgggctcttggacagcttcgatgcattgcgagacagactgagtagactcgcacacaagccgttcgcttcctgcaaccgatcatccgacttgcaagcttggtgtcaagaattcacagcattcatcaagttatccggaccgttgatgaggcgcccatcttttcgaatgatcgatgaataaatcgatcgatggaatgattcgcggtcttgtctcggactaattgccgaaacaagcgggtgcaagatgacccagggtttgagactgaaaccctcctttgaaggatacagcgggccggaacggaatgcaacaagattcttgtcttgcatatgtgggacagcaaaatgatacaataatcgggccaaggcttcccgatctaaaacacacgcttcgaaaatcgaaccatgcacactcgattcagtattgttacctcctcaggtatcgacaggattctacgaggccgaggccggaagccttggattgtattatattgattacttcaccaagaggtttcaagcaagcaggaagcgattggagaagacgagcccaaaatcaatatggactcacgactggacctggaatatcgcaagcccatcgaaccaaccgccacattcctcctgttttggtcccggcaccacgcccgctgagtaaaatcgtgtgcagatcacctgagatcaaagtggcctagaggagaacgaggtccagaaccttgaagagttggctgcttgaagatcgtgattgggtggcaggaatcccgacggacagaactcgacgtcaagaagcgcgccagcgcgccggagcggaggaggagaaggtcgaaaagatggccgagaaacagcaggtcaagaacagaaatcgcaagcggaaatatgagaggcaagccgctgccagaagggacgaggagctgaggagaaatcttgatcgggagttagcagagaggcggtgggttgaagccagattcgacgaaagcagcgatggcagcaaagaacgccgcgagtccccctcaacccggagcaacgatggcgaccggtacaatccgaccgatgagagatacgagaggaggcaggagaggagatacgggaggtatgagaagagagggacacgagagattcgacacataccaagggaggtgcgatgacagaaggtatacaggagagagatattgcagcgaaggccggtggttctcgaaggactgacccaagacgagcgtcctaaagtacgtttggtgtcagaaaactatcggctagcagctatcgacagcaaaggttgtccgacagcatgtatgcatgtgtagaaccatttagttatccgaccgatgatcggtctgaatgcgatacaggtcgaaaagacaacaccgagagaaaaggcgacctcgcttacgtcacgtcgtccggaacgtctggcacgaccagatgtttagtcgactcagtactcaatcgacttcctcgacagtagacgtttagcacaccaccatcctccatcttggcattctcctttatagcgacccgcacttcaattgttcggtcttatagccaatcctcgcttgaaagactcaaacatcatttcatcacacaccacgaccatagatccggcatgcaattgactgacgaccgaccgacccgggtcaaccgatattctgccccgcccttctggggtgtgccagcgatcctcctcgtagtcattccctttcaattcttcgtctatctgtcttctcacccagtcgctatctttgtcaagaacacagtggaggggctgttcggcaagggattcgtcaacgcgagcgtcaagttcttgatcggagctgtgagtgggctctagtcttcctttctgggtcgggcagactgacgagggagtctcgttggtttcaatcgcagcatggagcagaggcctcgtatatgctgtctcaatgcatcaagtaccattgcccaccagacgtcggcgtacgtagcggtcgggatgatcggcacgtctttgctatacttgggattctgatcactgcaacttcgcttacaggcaaagtatgttgggacgacgctcttgctcgggtttgtcggaatccagcagttcaacagacaaggtcagtctcggcctgtatctttccgccacaaaagccgagtgtccaaatcaactgcacgaatgggaagctcacccgattctgcttgcaccctcctttcccttccggcgtcctggacttcgggctactcctctatggtccgacaaattacagtgagaatagcggagaagggcaaagccaagagtctctgagccgactgggtccttcgcggacatagagcacaactttcgccatatcgatcccgtgtatcagtagcctcaagccaaacgaatactatgacgataacacgcaaactacgcagattccgtgctggacatggccctcgtttcgagttcttatttcgagtagaaggaatacctgaacaatgctcctttagtcgtgtgtatgaagatacaacggcggatcgaggagagacgtacgtgcgcgaacccctaacgatcctttggtcgacctcattgcgcctaccatctgcctgaggatttcagcgtcagtcagtagggagaggctgagaacatttggattgaaccaggcattgactcccccttgcagtcagttgggtgttcatcgccgatcacgaaagacgttttttcttttggaaatcgtgaaaaaggtgcacggggttgctgctgagagatcgtcagctgtcatgtctgatcgcgcctctattcgtcttctgcagaacaagttgcaaccattcaaacaagatggcgtgttcgagcgaaattgatccaagatctggaccaatactggaagacattccagttcgctacattgtggatgtatcacttccaggccaaagacgaggtccgggaggaaggcatgagggtacgcgactgatttcgtgaacggcccaatgtctgctgcaacgcggctcgaaagccttggtggcggaaatcaccgttacaaggacgtgcctgcgaatatctttgctctggatgaggggtgcggggcatgaactggggtttgatcacacagagataggtcgtgcggcacaagcgagggatgggagggagcacaacctcttgcatggatttgggacatcgtgagcatgatatgtcggtctgacaaggcatcgcaattcgcttgccattcgtgatatggccaacacttttcagcagctcagcaggacgatgtacgtctaatcttaaatcgggtttcgctcggcgtttgaaatgagaattcgttctgacggccttcgatacctcgatgtgtcctcgccaggcttctgaatcgcgcttcccaccttctgggatgacgatgaggtatccaaggcaagtcaaggtgatcatgccaaggtccacagaggaagcgtcgtatttgtcgaccattctgtatgctcatgatgcaacattggccctttgtcaaaacggacaatcgcatcgggtcgttcttcgagaaaggtcaatgcaggactccttgggattgaattgagcgctctttctcggattgcgtcgagtacttccgaaggctccagctgcaagggagactacctcattccgacatcaacccgtcgattatcgcgcggccccaatctgtcctctcgtcggcgtttccgttttgggtgtcgcagtgatgcgccatacccgggacgatctcgtttttataaacgtttcacctcgaacacccgcctcgtcgtcatcatcaaaacaaacatggctgcatcgtcaccgtcgacacaaaaggcttcaacagctccgtgactgccacacagaggtcctgtatcagttggcgttttccgcttgccggggacgtgaatggtataatggtcttgcattggaacatctgcaatggcgtcgaagtgagttgagtcatgagtctagccttcctcaatttcaacggaggtcgagtctccaaggaggtcgacccgtctcatcgcacgatcggcgaaatgcaacccgagtcaggatcccggcttcgattctgatacgtgaaccatcgtcattatcgtcttatcatccacatccgcgattcatacgcatccatcctcgcgatccatatgatcagggcgcgaggcgcagggtcatgtatcgtattctctattctactgttaatttcatacaaccatatgggactcgtctcgaccatcaaaggcgtatacatatcaaaccggccgggggcgtcgtctctctttcgtatcgccccacactcgtctcatctcatctcgtctcgtctcgccgtgtctacattctcagcgagcgtattcatgcccgggtcccactccagctctcttgcccattttctggacctgggccatccaacatccttgtgcttcgtgcctctcaagggcgatccctcccgggggaaagggggagggggggggaagagcggatgggagagggagcctactcttcaaatgatccgtcggaaccacctcgatcgggattcccattcccattcccctcgtcctgatcctgatcctgatcggaatcctcttcctcgtccgacgattctctcgcttgtgatttcgccttgcctttcccccccgcgacgcctgctccactgccggcgactccaccaccaccgctgacggcccctcctgtcgggtcgacaaacttggccaagacgtcgtcgaggaaatcatacgtcctgtcctgcgcggccagacgtttgatatggtagggcatgatctttttcgtattctgttgttgggcgatgcgggacgaggcgaggacgatgtctttgaggaatagttcgagggctcgggctggggtcgggggtgtaaaggcggttcgatttgggagagacaatatcagagcgggagagagggaaagagcaaggtatacgcggaagaagggtcaatattccgtgaacccctggtgtcaagcgcacgcgcccactcacagatgacgatgggtgcccccgcggcgactttgccgatctcttcgtcttcctgcataatcttttttatccgggccgtcgggaactatccgatgatgacggtacaagtgaggtcgattcagtctgggagatgtacgggggaggtgttgtgtggcggtaccatgtgctaacctttgactggatggctttcttgcccttcatcgtgatgggtggttgggaggcgtttcgagttatttacgatgtgaacctggagcttttcttttggaacaatgacgaggatcgcgatgcttgatgataagatgtcaggttgatgggttcgtggggtgaatttacttttgggttgtgtgactccgcgcgcgccagggaaggggggaagctgggaggctgccttctttatataacaatgcatccgaataaccagccagtggatgaacgaggccgacgacgagtctaggctccggaagggagctgggtcgtgcgtggccagtacgtaagcggatacaaacccctcctctccccgtattgcccttgcttctaggcgacccgagcggaatcaagcggattcaaaaattaccatttcatcccattctccatccacccaacctccctctcgcaatcgtcgtcgtcgggttttcattcaatcggatcattcgatagacaatctcatcgatatcactacctcgtttgaatcctctcttctctctctttctcctctctctcttctccttctcctcctcccagccatctaattccaccttatttggatgtctgggaaaggaaagtgaaaacctcgaattcaacgctaagaacgaaaaaaagcacacccacctaaaacaccccccgtacacccaaagacttgctcttaaaaaaagcaactcgtcgcacccatacttctttcgacacgttcataccgtccgcctccttttcgtccccccgcgaaaagaacatcgacagacagtctagagaatagagaataggacaatccccaaagagtacttgactgcacttttttgaaaaaccggatagcaggaaaaaaaaagacgaggttcgcccgaaagcccgaaaaacaggtcgacgactttttcttcacaccgctcccaaaccaaagtgagtctcagctgctcgaacctactcgacgggtcgacgatgctgatccgctcgacgctcccatcagacaccgaccatccactcacgatgtcgttcgcccaacccgtccccaccgcatcgagctcggacgccgtaccctctcaaccggctgtccctgcctccctcgtaccccacaccccgagcaccacctcgtccgagctcgatgcggtgggagcgctagtctcgtgggctcggagatgtgtataagggacaggatgatcgagaagcggcgactcacaagaactctcccaactcggcctggaagacaccgtcggcgacgaactttctcctcttggaaatctgggcggacatcttgatgatagttttggtgactaggtttctcttgaagtgacgaagaaaggtgagacgagttgtgtatatgtgtgtgagtgattgtgaattaggtgtcgttgggatatcgaggatgtcgagggggcgagcgggagacgaacgaagggaacgatcgttccgaggcgaccaaggtggtgtgtgtgtgtgtgtgcggtgtgtgagtgcgttgcagccaaccaacgagcgaacccaacgaaaccgaaagggaacaaccagaggaaaagaaaatgtcagttcactacgaatgatgctccctgacatgtttaggctaacaaccaactcgcgcgcgcgcgcgcttttgcaagctcaaatcatcaaatccaatcgaatcgaatcgcgacgcctctaccccgcgcgcgagacaccatgacctaatctccgacgtactaatcatcgctcgagtttcacttgattttcgaacaacagcctctcgaacccgacccgtaaacgtctttatcgcgcggttcgcaagatcgatgccttctctcattcgtttgcagcagagtgtagtgtagtcgaaggcatcagaggaaaggctcttgtcgaatacatgatggatgatatatatgagagtgaacaaacggtcgtggttcttacttaggtacatgaaaggccgtgacctctccgtgacgtggcccacgtcgccgcattctataatgcagggctgcagtcagggaagaaaagatgaatgtcgtacgtgaaacgtgaaaggatgtcggccgtggatcgagcgtggggagcgatcgatcctcgataggggataaccgggcaagatgaacctcggggacaaagatctcgctctaaaacctctgtttcagcctggcaccgacgctcctcaaatgagcatagaccttgcctgtaaaagttgccatcgactcggtcgtcagaacaagcacttagcgcgtcgagcaccccgaatcaaaactcacctggaggcgatcccaagatcaacgagacgatggcatccctggcaatcttgatgttctgcaccgatccgaggatatgcacatgcctgctcgggaaacacgaacaccgaaaaggatgaacgcaccacgacgagtcagcctccgagctcgatcgggtgtcgtcagaccatccatccatcccccccttgttctcgtcactcacgtatcggcgaggacgatcctcgtccggctcgcattctcgatcgtaaacttggtcttgccgtcctgccctgcgatacgcccgatcgctcgggacaagtgatccccgtgcaacgtcttgacgtccttgatctcgaacgaatcgaggtacagatcttccagacggaggatggcgatggcgtcctatcaatgtcgtcgcgagcgtggtcagacccagtgggatcgatcgggtacacggcgtcacgcgactaaaggcggacaggaagtcgacgctcaccttgacatcaaaacccaaggcaaaagccttgacaaagtcggctcccttttggatagcaccctgatcgggcgtgtgtttcgaggtctatagcataacagtgcataccatcatcagtctcaacgccgtttgtaagggtgaagcggtcgattcggctagaaaggcagatgatgtggggcctgtagcacgctcgggtgtatcgtgtgggtggacgagtaaagcttgccatggatcccaaaccgcgagcgttgtgtgtgatcatgacccgcgcccggtgcatctgccctttcctgcatgtctcgaagccgaaccgccagccagaacaccatgtacacaccttcatctcgacgcatcgcttctgcacgttcatcctgaccatcaaacccataatctcgaccagaggtccgtaaatgttgacccactcctttttcaaaggagccattcgatgagcgggcactgccacccgtcgctcttcaggcttcaatagcttcttgttctgggcggtctgggagatggggagaaagtcggacgaggtcttgttgacgctcgctttggcagtcgaggaggtgtcggtcgacccagccgttggtgccgagtcgataagcatgtccgcatcatcttcgtcctggtccgttcgtcccgtagggatcaacccgtcctgatccatctcgacgtccccggtagcggcagcggcttgttcctcatcatcgtcttcctcgcctaacggcttcctgtcatcctgctcctcgtcttgattttcgacagccttggccttgcctttaccctttccaacgacaccttccttggccgatttggtcttcttgaccttgggcttgacaagcgatgaaggcgggaggagttcaccagccgatgtggagggtccggcctcgagttgggcggcgagggctttggcacgatgggatttggacgacatgtcgcgcaatgtgtttcaatgttgcaaaagagtcaggtagtggttaccctggattgttattcaggtatcgtaaggcgtgcagatagagctgttgttgtacgaccggcttggagacacctcgaccagtgttactgaatcttcgtagatggccgagaatgatcaacttttgttcgaggtggaggggaggcgagataccctcggatgcaaaaaaatcaaccagttcaatctcgaaagatgccggcatatcgtttccggtgccggtctaggccgaaggtttgagggccggtgccactttgcgagttgtaagttgaaagttgctattatatagaatttgccatatcgttctcttcaaagtatgggtagaacgtatcgcctgtcatggagaggggctgaagatcacgtatgatgctggttctactcatatacaacatcgactgaagaagcctatcacagatacacaggtaaacaagatgagacacctagggttctcgctgatcagtctttcgctttttcctggtcggtcctgcgaacaattcatctgatatgctaggtttgggtgcactgcccaaccggtcgttcgaaatggcatcgatgacatcgcccgcgatactgttggtggccgaagggttcgttggtgtagccgtctccacgccgggaggggtaggctcgttgctggtattgttgaacatgccatcgaaatcgataacggcatcttggaaaagctcttcatattggtcatcgttggtgaagacgtttggctcgatggtggtcggttcacctggttgactcgatggctgattctgattctcaaatgcctgcagcaaggctttgacagccgggtcagaccagtcaaagtcgacatcctgaccaagtaattccccatccgctagcgtggacggattttgtgcatcatgcccaaccatattgggcatgacattgttgtcgaggaatggcggggcaaggtgatccggtaggccctcggcttgtggaaccgcggtggacatccatgacgtatctccgtccattcccatcatcgaggtatccgtctctacagggactctctcatcacggctcgtaacttgcccaagcggcacagtaccattgatgatcgaaccgactgtagcgtcagagaacctcgatccttcgctgacggcatgtctttggcgaggtgaggcgggcgcggagcccggttgcccaaggaaggacgctgccgattggcccaatgttgcaaggaattgcgcaccagccggggtcgatagcagcgtgcctagaggcaggttgagaatcgaaggatccagcgtatattggccattgttcgtttgcgtgacaacggggttgtgcaaggccaccgtattgtttgaatggggctgaaggcctgcacgctcttgatcctgacgagggttcccgtctgccccacctagcggcggaaacaagcgcgtcgacgggtctacgctgtgtacggttgtcggggtagccgcatcgctggaaccagatttagttggcgtctcaaacgaagctcgcgccatttcctcgggcgatccatcaaggcgctcgaaacgctccgacggcggcgtatcggctttgcgatgagaaccaggtatccggccgatattgtaactcgaacgcgacggtgtagctgttctcgtcagcaaaggccgtccactggagttttgtcgttcggctgtagagaatggactgatgagcacgatactcaacgcgtcgagctggacttgaactcacgtcgtggctgtggcactttgatcatcttcccgctgtcatccacctcccaaaattgacgagactcctcatggtcgccagtctcccatagatccgcctcttcgtccatgtcctcgtcgctcgcatttcctcctaatccgttgaccccgtccccaatcatccgacctttaccaaatcgagcgattcgagtcggctgcgttccagatgcggaaggtagattatccccttcatcttcgagaagcgccatgttcatattgccaaattgacccgctaagaaccgcatgacgctgtccagcttcttttggctcttcaattgctcctcccggctaagcatggcctggcgccacaacatctcgtttgacgctttcaactctgccaattctctttccagggaggtatgtgtgtctttcatcaaggtcattgctttgttcagggattgagaatcgaccgtgtccttgcctagctgggtagatgagccggcttgacgatcgttgctggatggcacccgacccatcgcctgcggatcaccgttgaccttgttgatgatttcgtcttggttgaagccgtcgggcagattgcctccttgaccctgcgcagccagagcagctgcagccgccaattccttcgcactcttctttctagtgatgccgaccaaccagtccggatgatctcggtggaatttgggatttgagaactcccataactcattggtaggttgggggaacgtgttcaaagtgccggtctggagatgcggaactttctctgtagaaaataacgaaagtactgcgttagggagcagcgaaatatgcccgagagcgcgatgctttacttactaaagccgtacatgttcagctgacgcacgaaactcgtaaagttggcgtgcttgaaaaattggggtagcaattctcgaccaaagtcttgggtatttgggactatcgggacagcctgatgagacatgtttcaatctgactctcaaacgtcaggacgtactgtaaaacgaagcgccgtccgctgcccaataaatcagggcgtccgtcgccgcatcgttgatcatgctatgcacaatagcatagatttagtacgtattgcagcaagtggagacaaagacaaagagatcgactcacctgaacagtttgttcagaaacgcagggacctttgaaccccctggagtttggctatcgagtcccccaccaaccgtttctttgcgctgctcggaagtaggaggagcgaatgtcacattcctgtctccgatgtccatattgccagacgaagagggttctgcatgcgcctttatgccactaggtcggagatccgcaacactgcgcagaggaggtgatgcattgggtggttgcgaagagcctgaacgggttcgattgcgcggcaccggaatcgttggcggccgcacgctgtgtatttgcgaggtagcaccttccatcgttagacaacgacaagcgtaggatctggaaggtaatcctttcgagcaagaatatccgtccgccaagttgtagggcgcttccttcggattacgtggaagacataatcagtcctggattacgtgcggtgaacccgatgaattcgagtatgtcgaggatggggtcgctcaaaacggtaggattcccaacttgaaaaatatgatgcctagttcaggagcgaattcatttaaactgcgaggtgtaagggcagggtaaaggtagtcactatttagacgaatacggcggggatgctcatgtcaatggatcagcatattcaaagacgccgagttgggttgtaacaccgtcggacgcggagtcaaaatatagcgacatgtccgcagaggaacaaaggcccagctcatgtgtttgcatttgatgtgtctttcgtggtacagtgacatgaaacatgctttcaatctagcctaacctgcctgacatctctcgatgctcagaaacagagctcattcgttggtcgtaatctaaaattggctcaacccaggcggatctctacattcaagccccgttcgatccgaaggggtattcgaacggcgcggggggctctgcctcggctccatcatcgacctccatgtcaccggctgtggggacttgggcagccgagggcggcacatcctcctgagcggcggtagcagctggtgcaggagcaggcttctcgaggttcgagttgagatcgatgtattccgaggcttcgtcaggtttggtgtcacgcagcatgatgataccgcctcccgtcgtagttctcgagctcgaagcagctgcgtcggcgtgcttcttcgactttcgcgccacctgcccagaggtggaggagcttgggataggccgcacaggctgatatcggccgctgttggggaaggcgatatgtgcgagctgcactggcgtcactcgggcaaggttctgcaaagtctcggaagttggttcggatttttcgtcggcagccttgtcatccgccttgctgtcgtcctcggccttggtagtagcctcaatcttgtcatcctgtcggcatatacgtgatcagaaagactttcatgctcgagtcgcacgcggactcacagtctccatggcctcgccatccgcaacagccttttcctgctcccgagctttcgctcgtgcattcgctcgggctgtagtcgagaggacggcagtcttgaccttttcgacggtttccttctttggcggctcataaggtgccgggtaggcgaacaacgacggtcgcgcgttcgaaacgaattcgagtttggggatctgttaatagcgtcccatcagctctacgttctgctcgagcacgttgtccttgtcgcgtctggctgaccttcaagctctcatccagcccgatgactccggtcgggttaaaactcaagctcaagcagtgagctagagggaaccagtaccagaactggctgaacaaggtcatacccacgatggccatcatgttgggcgtgccagccttggtctgcatcgagatggttgcattccttccgccagcatcgatgatgccttgggaaatggcggcaccaaacttggcgagcgagtcttcgtgcttgtcggagacggtcttttcaaacagttctcgtgccatcttggccttgggcgtctgtgcttcgctatgctgtaccaagatcatagccagcgagacgagagcaccttgacggacaaagtcggtaggatccttggtcatgggttccaggatctcgatagcttcctgatgacgatcaaggttcagacacagtcaacgtcaacagttcctcaccgtaaccagggcaaccggtcactcacagccaatccggttccagcacaactgattcccaaagccagagtggcaccgtgtctaacgtgagggttgtaactctcactcaggagctggaccacccgtggaacctgagtgtggttgctgaacatgacgaatccgagtgcggtcacggccgcccgacggacgtcatcgttggcgtccgatacggcgacgtgcaaaagcttcctgatagcctgattgttggcggtaccagcgtatgccagggcgatcgtgtacattcctccgtaacgcaagatggcatcctgtgaggaagcggagtcgacgtctttagtcttgcctcagatttctcgcgcagcgacctcttgaagactgaccttttctgccaacagtttctcgatcacctcgtccgctgcttgcgcctttccgtacatcaagaacgcgataccgatggcaagcccacggatgattttttcgtgctgagtctcgtgagcgtactgcagcatttcatcgagagccttctcagatgcagaccccagcatgatgagacccattgcataacccgaagcttctcctgccaccgcggagtcctggaagaggacgtctcgcaaagcatcataaacatctagaaaggaggggaatgaccggaagatacgtgagcggcgaatcgatttcgagggcaggccaatctgcactcaccttcgtcctgactggcaagtccgctcatacccaaaccgagcgcggcaccgtgctgaacagtctcatccgtgttgttcttcagtttgtcaaccaagtaggggacagcctcctgaccatgtccggcgttgatcagaccaagggcatagagactacctccctcagagtaagggctcgagtgtgcggacacgacaccgtcagctcgaggcaggtaaggtccaagaacggtcattgctttggcgagagatcccttgtgaataacccccagggctgcggtagccgagaacattgaccagttggatgctcgacccaaccattcgaggttttccctaaggaactggtctgatgtggttcctgcgttggcgaatgcgttcatgaacgtgacagcagagtggtagatcgaatgtcgagcctcgagggcctcctataggatcgcatttcgcatcaacatctttgcggtccatgcgcatcaacatgcgacgggactgttgctaaccttggtgtttttcaggatgcgcaaatcggcatgattgttcttctgcaagaactcgaggtaaagtcggatgctcttttcgcccgacaggatatccctcaggtttttagacatttcctgcgacgtgcatatgagaatgagcgtcggtgacacggctcgagtgtcactgtggaatgaagttcagactcacatcatcaccctctcctaacgcttcccgaacctttttcaggaattcctgaccgcctccctcggccagatcgaatccgacctgataagcctgcaacttgttgccttgctcgatcaggttcttgatcgtctcggccgccagggtagatccggtctcgacgtcggcgatctggagccagatttgcgagatggacgaatagtccttttgcgacgacaggttgaacagtcggagcaagagttgcaagagctatgtttcccaactatcagtaccatcttccggttacgtgcgtcgatgatcaacctctcggactcacctcttccctaaaaccggctccccatcgctcattcccgctcgcaccggccgtagtctctagcaacacgtatcgcaacaagtcctcgtcgtgctcggcacctccttcggttgctcgagggtttttggattgcatgtagaccttttccagcaagtccaggcgtcgcaaggataacgtcaaaccgatagactacgcatcgtaccattttcgtcgcgatcagctttggcgtccgatcgtcttggcgttgaaagattggtccgtgtcactcaccaacttggatgcgcccgcacttgcgacctgctgggcgatgttgccttccaaaacatcctcgacgatggtcttcaacctctcgtccacttcctctccttgaccccgctgcaagatggcccgatcgagacatcgggcgatgatcgtctcttgatattccctcgacgaggcgtcttgggtcgcagatttagatgtggacgatccgttgttctccctggcgaaagcggtaccggcggacaaggcggcatcgacggcttcctcgagggaaccgaggtggaagtagagtttcgaggagaggagggcggcggattgacgggattcaggggacagaggagaggtagcctcggatagagcctcgctggattgagaagctctgttggtcagggaacgcctcgtcgatggtatgctcagagcggttgacttacatgtgtgtgatgctctcgctgatctcggcccaatgcgaggcaacgacggcgttcagctcttcgatggcatacgattggatctcggtgtccgggtcatgaaggagcgagacgagtcccactggcatgagccgtacgagtgttcaggccatcagtaattcgttccgccgccttgtccacgaccctggacggcttaccagcactgctgctctgagcgttgaccatgacgtgattgtgtgttcctgctcgtactgtggtagttgatttcggtgccgatttgcagactgtcccaccgaagatgcaagtgatgtgagatatgaagggttccgagacctctgcgttgactggaaagatgattgaatccgctgtatggatggctcgtcaaacggggcatcatcatcatcatcatctcgatagctcgatgcatctcatggaatcaggaccgaggtgacgacgcagagtaagcgcttcgtcagtcatcatcggtcgtcacattactttgataacaagagagatagatttcaaccatcatgatttaatatgacgtgtcaactatatattcccatcaatctatctacctataaatcgtttatttattatctgttcgcgggcggttggatcgggattcgggtcatcgcgcgggataggataggggaaatacggatcagcagcaaagtactcgtagaagtgtgtggtcgttgtatatttatcgtccgacaacgtcgacatcgctcactcccattaacccatcatcatcatcatcatcatcatcatcatcatcatcattcagccacatcacggccggatcgactgtcttgtttgactctacagttatcggtgtcctgtcccgtctatcctccatgcgataacggtcaaactcaccgcaacgctacctccacctcgtccgacgccatcttgacccccgaaatgtccgtcgcatcgggatcatcttcgcagtcaccttggttacctcgggccaaaatcgtagatgattggatgaagcgtgagtatccgcacatgcttccatcatgaaggggagggtgggacctcttgatccgcacatgtccgacttcttcgcaaacaaccgtcactctcgtaaatctttgttgatctcgtttgctgattgaatctttacacctaattctcatctgtcatatatgatgtcgagcagaacatcatacggtacttcagaccgcaatacgactcgatacacatcgagactgaccgcctctcgcccaacctataggtcgtctgtgcaacctcttcctcgctcatctcgacgttcgccggcttcccggtaagctcaactgagggaaggattcctatcctcccagaggaacgtgctgaccgactccctttgtccgacttgacaccgtcgttatcagctcgattcgatcaagtccagattacaatcacagcgcggggaaggcgtgtcgttggccaaggtggccgcagacgtcgtcagagatgaaggaattcgagggtgagccgttgtttcagagggtccgtctcgacgtcgaaagcgccgacttacacacccctcgtgtctgtgtaggttatggagaggtctgccattaccgctcgtcagcatatccatcgtccggacgatctcgttcaccatctattccgagacgaaagagctcgtgcaacgatcaggtttggctcggaatctggggaaagggaaagcaagggaagatcagacaggatcgtcaacccctccttacactctattctcggtcgctctcacgtcaagtatcgcaggagcggcatcagggggtgtcgtctcgcttggatcagcaccattcgagcttgtcaaggtccggcgtcagctggaattccagatcgagagggacaggcggctgcgcaatttccggctggcaggcggcacaggggccgcttccttgggagacaagattgtcgctaccaagacggacaaggaattgatggccgggtggaaagcgccaggaacttgggcagccgtcaaggatattcacgcccgttacggtcccaagggtttgtggaccggattcaagctgcatagcgtacgagacacagtggggacgagcttgtactttgccgaatacgacacgctgaggtggatcttggggcgggatcccaagacgggtctgcaaggcaaggtaccggactgggcaaagaagatgggtatcggggagggctgggtcgctttcggagctggagcctttgccggtgtgaccagctggtgagccactttgacgcacgcccgatcgagagatgaagtccctgatcccgtatgtctccgtatgcagggctttgatctatccggtcgatgtaagccccatcggctctgtgttcgtttgaagtcggactgacaagactactttcgttcacgcaaacaggcgctaaaagttagtctttaaatgctcgctcgagtacttgtgatcctctatgctaaccactgacatcggcttcatagacaaaacaccaacaacgtgcactggctgggcttcaaccacgaccattcatcgagcaaatgtctcgactcgttcgaggtaccgacgaaggcaagcctaaacctcttttgatcggcctcggacgcttgtaccgaggcctcggaatttcgatgatgcgatccgtcatgacgcacggtctcttggttagtgatctcataagctctgtttcacaacttgacttgaagctcaatcttgccacttcattccgtaacagtggaccctgattgacaggacaaaactttggatcgacagcgagccgtttgaaagatacgcacaggcgacgactatttcgtaatcaggtcgaacacacccagacggaccaccgcatgagagcctgcgcagaggctatcaggtcgatataccctagaacggacccctatctacacacacacacttgcatttgcccctcaccagacataaattgtataattgcatgtccaacgatgatacatcacaccgttcatcttctccgtctgggtcattctctgtcgtatgcagtaatagttccgtcgtgctctgccatattgggtagatctctcgccgctcggctgtcggaagggagagccgctcccatgaagaagcttcacctcctggtcctctttgcccgaaccatggagactcacttccagtaagatttatcgaggctacacgggcgtcaaaagctttgggcgacctgctgcctgaatgtgctgcttcaaggtttcaagaggttgctactggaaagacacgagggacagaagagacaacaggagaaaatgcgtcgccctttcctggaagcaatcgctgaatcgaccgactcgaatttaggctgattgcttgaggcggctgcagcttttatcgggagaacaaggcgtggagtttgggactcgaaggtagacaatgcagcctgatggaggatccccggaccttttgcgtaactttcccttcatcgcctccaccgatgattgacgcgactgttcaaagggttggaacataagctgcgtcacgctcatgcatcttgagccccactttaattgtggactcaccagcttaggcggtctcattcgctcgataacgcacgtgctgctcaacctatgctggtccttgtcaacaaaatatgttccagatcccagatctcgaagtatagcttcgggcgaaaggtattctactaattgaagctgggtgcagtggggaccagagagattgccccgaattgaactgcggcgttgctgtcttcattatccacgcaaacgcccgatgtcctgccgaaccgcaatccggttttatttcattccaccgtcacttacaaagtcgtaataaaagcaaagttgtttcatgcgaaggcggatcgacccctctgaacgatgttaggttgagagctttatgagggttcagcatagtgttgtttcatattgttttcccaaccgcttgcaccggactcatgccgcgcgcgccagcttgaaacctccgctacctcaaactggcgttcggcaactgcccctctccagtggacaactcgcgatctatatctgaaggttcatacgggcttttcgccacccacgccggtccggttgtccattttcggtctatcagctgaagttgaaggtcaagggacagtggcggtctgtgatctgtgatcgatactggacctatcgctctgactggtggcatttttggctgcacccgtaatgctcgttgccccatccttcacgaaaatattggatgttgtgggggaaagttgaaatcttccgctcgctgagtttcggcgtcgttgtgcagtctttcgtacacccctcgaatcctcgccttcaaaagcagtgactctcagtgtgccgagtagcaacatcgtttgcgaaactcgagctgcctcctctcctcctgtatgtgcgacacctcgttgaactcccgatctgttcaatctgatacgttctgataacttttacgcagcacacgggggtcggcaacacgaattgtatctcccgcagccaaccaatctcggcgcctcttgcccggtgcaaggatagtgagcccctaacgtacctagtctctctatcacggtctgggataccagaaacatcctgacgatattacatgctgaccaaacaccgaggctggtcatgggcgttaaccgtcccaatcactgaaatgaaaaaggacgagagaattggcatcatgaagaccttgagcgtgccattcgttaccatcgaaaacgccaccaagaaactccaaaatgggtttggggtttattaaccgcagcaactggtttgttcaacaagccttgttgtatcccttcaattatcttctaagaatgttgaaatgcatgtaaaacattgtagagagcacagaagtgactagtgatatgataagtcgggctcccaccaagtctgagaccaccagtttaccgcaacagtgcccagcaagaagactgccaggcttgacatcactatggatggatctcaacctccagtgcaagtgagagagggtctgttgagcttgggcccaacacttccggctgtcagcctacaatacgagacgtgtacagcacaagagctcaagcgccatcgttagcaatcggtattcaacgtaacgtaaaccgattatgctgaagagaggcataatcagatcgccccactaagtttctcgatcgattcactcgcagtgggtctctgggtaaacgttatgcacagagtggatgtgagcgaccgccgagatgaccgtagttaccgtagttatcgtctgctttgacaacagctgtgaaaccccaactcttcgcctcttgatggatgaatctccttgatacctggcgcaagttattgcgagatgtttacgaagaccggcttggtatcaatgggcacgactgtccatcggtcttaccgtcctatgaacctctaagtaaccagctgcgatctttgagagggccccggtccaaagggatgagaccctcgcatgggatatcgactgatctcggctgtctgggcttgatgacctggcggatcaccccagcatacttgcaagttatgatgcgttgtggcctgaccaatttgatggaattgtcgacatgtgatggacggttcgttcggcgaagaaattctttgctcgtcaggcaatgtctgcatgtcgtgttgatcagaccagatgaaggtaatccgtctgggtgagcaaggtcgacgatatctggctaggacactgtcgtgactatctatgagtaaacacgccttgcggtctgtctatccgtacccacgcacaactacacatggaattacacaaacgcaaggcttcatcgcaaacagggcgttcctgaagttttcgatcacgagacgttgtagcatgctcgtcaatactaaatgctgactatgtcaggcagataccgtgggtccatgttgaaccaagaggtcagacccattcctgagctccatcactcgccaccacgcagatccagagccaaagtcggtcgttatgcttgttcggtacaaaaaggccaaaacacaaagtgcaacatcctatgaagcgagaatctatgcggtgacagcgttctgagccctttccgacgactcgtcacccttgctttcgtctccctttgcgttgggcttcctggtcccctttttgtatgcccctcgtccctggtccttgccgctctgttcgctgactacgatagcgtcctggatggtcttctgaacatcgtcgaggacgatcttccattcgccaagacgcttgtcgagaagctgccactcggccgagccaaacgatcgggtttgaacggattggactcggagggtcttggtaggttgagacaaagaggccttcagtaggcccgagtgaatagctgtagaggaatccaagtcagaaaaggctcggcctcctggcactcaaagcagcctttgactgaccgtcaatgaccgagatctcaatgtcatcctcgtcgagcttgagagcctttgcaatgtcggcgtaagtgatctctttggtggaagagctggcggccaaagaagtcagggcgagaagtcggagctttcgtgcgatctggtcgctcttcaaagctgcatccgcgattgacaaaagtcgccttgattagcgaaggcatgaaaatgcctgccccgaatcgccacttacattcgccagagaggaacgactcgttcttctggacccaagaaagacccgcctccaactcgccattctcgaacaattcgaccagctccttgtattgaccgctcaatccttccctggcgctcttgacattgaggacctcatccatttcaaacttgctggggatagcgaaaagtgctcgcaaagccttctgggtcaggttctcgctctcgtcagcgtttccgtcctgaacagccgttcgcagcgcaaagaccctcagttccaaagccttctccttgtcgcccttcttggaacccttggtctcgtaaatctcggccgtgttgctcaaccacgaaatcttgtcgctggcagaaatctcccactgtgacaacgcggcagtcaaccaagcgttggtaagagggaagtaggacaattcgagggtcgagttggaggtgagaagctggaagagcgaagtcaaagtctggggtcgcagaccggatgaagcggggagtaggttatagatgttggtgagactgatagatcgtcaaaagtcagtcaataccggtctggtcgggtgtgcgagacgctccgcttacattcgacaggcgacttcggcctttttggatccactggcactcctgaccacggcatcggtgagcccctttagggtctgctcagcgttcttgaccgagaggatcaaggtagtcaacaaaaggtactgcgactcgatctctgcatttgtggccgttttcttgtcagctctctgctttgagccagataatcatgggatggcaagagctcacccctgtcggtaccctcaagaccagggtgaccctcggtaatgactgccacgatctttccaaccgtcttctccttgtcctcatcacttggctcgctcatgacctgcttggtctcctctccatcctcggtctgctcggtaaccgtcttggcagacgattcgatgagttgacggatcgcatccagaaactggttcttttcggcctcgggcaaggctcgcgcgaggaaatttgaaaggtcatcgatctgctcgagaaacgagagggcgggaaggatagcaacagagtcgaccatttcgagtgtcggtatgagttgatcaggtgaggttatatggaaatctctatatgagtatggtgatggagaaactaaagacgacaagttgctttgcatccataacttgatatctgacctactttgttcattcatcccttccgagcagcgagtgagagtcgatcgacccggggaactttgatcacgtgaaattggaaaccgtgacgcgccttccctaacactctgacgaccttgaattggcatcttctctatctactctactctactctactctactctcctctcctctctgtggatatcgactctgatactatcctcgccgtcactgcgtctcctctacataaagccaccttgacagacatctccacaaccaaccttaccacatgcctgtagcacccaccaccgccttggccgatgccgccacagaacgaaaggcgcgactcctggcactcaagaagcgaaagacaggcgaggtggatggcaatgatgaggaaggcagagggtaagggcgctacagcgatgtgatcacacgtcgatcaaatacatcggttgacgcaaccgtttgcaatatcgccaatgtccatctcagaaagacaaagatcgcactcaaacagcggaactttgatccagtgacgcggcagcctgcacaacatgctgctggcgggtccggcgaggatttgctcgatggagacgaccaagagactacagcagcaggagagaccgtagagaagcgtatggagggcattgcagagcgtattgttcaggaggacgaggccaagcgaacacaagagttggtgagtgatccatctcgaagtcgaattcagttgcaacggcgatccaggctgaaccactttcatgcggtacaggacttgctcaacatccaacccaaacgggcgaattgggatctgaaacgggacatggacaagcggatgcgcaagatggacagaaagactcaagaggcatacgaatacttgttccgtaagtaggctcactgaaacgagtttgtctcgcctttggccaaggccttttcctgaacctcccggtataatcctccccgtatctaggacaacgattacaggcgatgaagaagggccacgcaacggctcagaccctgccaggcggagcggatattctcgccaacatgtctgctgttgacaagcagcgccaagcgggagccgagcaagacgcagcgcgatcggacgatgacgaggacatggattgaggaagcatgagctgctatgttgtgggtgccgatctgccacatctatctatcgttgtataccatggccgccatgaagattgtcgtccgattcaggtttcatgtcgaattgagacgagctggctgcgacggatgtcaccttgttctggatcaaacgctgtcgacactattgacgatatggagcagtaggcgatcgagtacatatcttatgtcatgatcttatacggacagcaacacctcggatcgaaacgaatcaacaactgagaggaaggaaatctatgggtgcgaaacaataggtcaaagccccgtgggctagccccttttgagtgacttaggcgtctcgggagatagggtggagggagaggtcggcctccgagtcggggacacttgaataaatgaagcagatatcgaatcagcttcggacacagatgggtgaagagccaatcccagactgacgagaggattcggagggtgttggtgtgacccaaacctcccttccatccttggacggcaatgacagtctggttgggcttgacaatgttcaaggcaagggcggtcttgagaccgaacctgatcctgttgtcaacgtcgatctgccactgagcagtagggatgccacggggctcggggtagtggacggggtaaacacctcggtggaggtgctgctgacgagcggtaacatcgtctcgggtgactggaacgtagttgcgcagtcagcatcgctgtgtagatgacagccagacccacacaacaacataccacagatgatagggcactggggtcggtacttcgagcacagtcgggcggtggttccgctggtcgacaagacgatgatggcaccagcatcctgctcgatagaggcagagacagcggccaaagccaaggtctcggcggtgtcggtaggtcggggggtcaactgtctcaactggtcgaagagaggagggtagcagatggcagactcggcgaggaacgcggtctcggccatcatgcggacagcctccaaggggtaagaacccttggcggtctctccggaaagcatgacgcagtcggcaccgtcgaggacggcgttggcgacgtccgaaacctcggctcgggtaggtcgagggttgtactagaaatcgaatgtgctcgtcagccagcctgttgcgacattcccgcggtagtcccgatttgcggggtcgagacagatggtccggtactcacggtcatcgactccaacatctgggtggcacagatagagggctttccggccaaagagcactttgcgatcatcattttctgggccatgaagacctgactggcggggatctcgatacccaagtcacctcgggcaaccatgacaccgtcggcctccttcaagatctcgtcaaagttgacaacaccctgctcgttttcgatcttgacgataatcttgatcttggcgccgtcgggtccgagaaccttcctaatgtcgatgacatcttcggctcgtcgaatgaacgaggcaaagaccatgtcgacgttgttcttgacaccgaactggagatccttcttgtccttctcggacagagcggggaggtcgacgggagtcttggggaggttgactcccttacgcgaagagagggttccgttgttcataaccttgaccttgacgtgagcgccctcgatggcgataaccttgagggtaaggatacctaagattggtcatgtattcagtccccccgctgtatggacatatgttgcacagacaaggatcgactcaccgtcgtcgacgtagatgagctttccaggcgaagtgaccttgaccaaattggcctgttgcaattcgatcaatcagcgtcagacactcaaggtgacgacatttgtgaaacaactcacgtagtcgacaaacatgtacttgtcgtcacagttgtcggcgtattgagtgtcggtggtaatgtacatctcgtggccggcgtcgatcttgatctgcgttttcgaacgtcacgggggagtcgttagtgatcgcttcatatccaaatccgtttggcggaaactactcacatcaactccgtccttcatcattccggtcctgatctcgggacccttggtgtcaagggcaatggccaggggcctggtgccggctgcaaaatcggcgtcccgcagtgagtcaatcagactgcgagcagtgattcagatttcaaggaagggggacctacacgcaacagcctccctggtgttgtcaatgacgctctggtggtactcgtaagatccgtgagagaagttcattcggactagaaagcagatcgtaccatgtatagattagcgggcgaatcctaagagcaagatctccgcagcagctagacagtttcaactcaccaatgttcataccggcctcagcgagagctttgaggttctcgacggtgttggtcttgggaccgatggtggcaatgatcgaagtctgacagatttgaatgtgcgaacatcagatacctcgctcgagtaagcattagctgcgatgagaatgtaaacatacctttcgcaaaaacttttcgttctcatccatggcgtcgaaagtggtcgagagggtggacaaccactccaactgggaagatacttgcttggtgacaaccattttgttctgtgctgcgcttgttgagggcgatggtgcgggaagagcgagcatggacaatgtggttgcggttcaacgtgtcgtcgtccggtttagcgaatcgtgcgtccatcgatggaaggttggtcaagggcatttttgtttgagaggagagattatgtgtgatcgtgatgtaaagagcggagttatcgatgcatcggattcgtttgtcatgtcgagtaaagaaacgtttatgtccatcaccgatcggcatgcaaaaaaggtagggagcaaggatttatcggagaaggaatgagtcaacttttcgagatcccgttcggattcctttgtcctggtagtagacttacacgtttgtgatgtggtttcggtaatgtagggattgagatgatatctgagcaaaccgatttgaatttaaaatcgagtttatcgaagtaagtctgtcgctgtcgagcatgtccgtacaagtaggtcgagcatcgagcaaagtgagagagacggtcctgcaagattggcatcgccgtagattggggagcatcctcggtggggaccacaggcatggcatggtcaaggcaggggaagaagggggcgcgaacacagacacagacacagacacacacacacacccgcacacgccaggcagcagggcagccgagccaccctgtgcgcgcgaaccaggcaaggggcaggaggaggcgacagggccacagatccgatccgatcccctcggctcgctatcaggaaacatcgattcgctggacaccacactcccagccagactaaatggacggaagcaaatgcaaaatctctcgttccgccctcgcgatggactatcgcatccaccctgccctcatgcggcagttgtcattggttctcccttcacacccgtaatgacaagtgattagcaagccaagcacggggtaaacatgccgcaaagctcatactcgtctaacggagactgactgaacatggactgtttactggatgacgccacgattcacggccccttgtagcccatgtgtgaccggcctatcatgcacgtcttttgcgagcgatttcataaaacaccgagccatttgagaggggaaaacagtatgatagttgtacgggtaacgatgggaagagtccctctcggtccttgacgataccattagctcgccaattccaactcatgaggagcgctaggaattgacgaccggcctgcctgctggagaaaacacgtcgattcaatccgataatctactgctgcttgcactcctgagcatcctgctggccaccagcatgagcctggcgaagctcctgctcgtcgtcctcctgttgacacgcgggtgcgacgagatcagccttgattacccggaagaaacaaaagcgggtccagctcacatcatcgtcaaagtcctcatcgtcaaactcgtcgtcgtcgagctcctccatgttgtcatcgtactcaagggccttgccggtaaagtagtcaatggctcttgggatgatctaacggacggcaagcagtgagactccgcagtgagcaacacatatcgaaaaacggtacacttctttcaaataactcaccctctccttgaggtcctcgccgagctggtaatcgatctcgagcttctcgtctaggtcctcaagttcatcctcgtcaacgttgccttcctccatggcttccatcgaaggaggctgagggggcttgaagaagttgaagaacgagtctacgggaacaaccttcttgatgacacgagttcggttggtgtctgcgagggcaagaagttattatgagtgaacatgcatgtctagtcggaatctctggcgaaactgtagactctaatgactaactcttgtttcgctgcttcttgatctcgatcttcttggtaagatccttgtcctccttccacttgatctcgtgaccgacggccttgtcgtacacgaagtcaccgccgtaaccgacttcctcctgaagcctcgaagacgcatgagctgggagcggtgttcaccggtagacgatgcaacgtacctgataatagtaagtcttctccaagacggtgtcctcgaagaattcgttagcttcaaactcgaacaagagcttgaaaccgggatgctggacatccaagtactcgagacggatgtcgacgaggtgacggatggcctggatgcattagaccactaagctcggaacgtgaacatatattgcacgatgccaacccaaaactcacctcctcatccttctcggtaataagctctccaatgacctggtggttcttgagggcggtcaaccagaactcggggatacccttgatgtcagctttgtcgccagactcatcgacctcttcaacgcgggcctcgtcgtcgtcatcctcagaatctgagacgtcgctgacggcttcaccggcagtgacctcgtcctcggtgggctcggcctttccagcaataatctcctttcgtcgagtgtaaagaggagcgtaacgagcagcaaactattacgaggcacgggttagccgcatggtttaagatcagtggcggagcaatccataccttcttctcgatctcgagaatttcacgctggaactcgctctcgatcttggcatgttcggtctggattccctttagtccctcgactcgcctcttgacggcagggggcaatgatttcaggtatccggaaggcttgccgacgagggctccgagtcgatcttgcatcatgttgagcaaagcagggttctgccaaagagcgcggtgcgaaagttagctgtcagcggcccagtcgagatgcctcatctggccttctgctcgacgctcaccctggccaaaacgctggcagggtttccaccctcagcttcatcctcctcggcctctccaatggtagcgacagtgggctgaggcaggccgtcacggccagaaatgggcgcggcgttgaggggagtgttcatgggagtagccgcctctgcaaagatgatggcaccataagaaaattcgaagaaagggcgatgtaatcagcttgaggccgagcggaagaaacatgaccaagtagtggcaagggggttcataggttcaatacgaggtgaggtatctccaacctagaagctacttttcgtgcctcccccgggagtggtgcacagacgaaccggtgtccatgacatcgatgcctcgcacaaactcgtgctcaactaaaaacgcaaactcaccctcaatgtgcgagttctttctgggttcgatgttttgggccatgttgtctaaatctgcgtgcgagtatcgatgagagtctcttcggaggcgacaattggggagtttgatggaatcggaaggaagatgagggttgtatgtatggctggctgtttgggtggtggccgtggtgatggtggtgaggggcgaagctgaacgtttgagggctctccttcccctgtccacgcgcgcactcaccagaagggagcgaggaagctcacgcggacatgaactggttttgttccgaattcaaagtctagttgatcgccaaatgatgtccgcgcccttgtgatgactcagcctgaccagttgggaatgagcatacgagatgggcagatcttgactgcgtgactaaattccgtagaaatctttattagattttgtcgcatttgccttcgattcgtgtttcgcacgaagacatagcttccttggcgatctcagccgataagttatagagtgaaacatattggtggcggcgagtgcgactgtcagacctcttgtttcgtctatcagaaccaacatgagtgccatagagacaccagtctccaggcggctttcaagcgtaaaaaatgtcatcgtagtcatttctgggaaaggtcggtcttgagactatcaacacgagtagatcgtcaagttgactcgcatgaccggatatgcaggtggagtcggaaagtcgtcatcaactgtccagcttgccttatccctcttggcgaccggcccgaacgtgcgggtgggcatgcttgatattgacctgacgggtccctctttaccaaggatgcttggcctagactcgcgagcggtgcatcaatcttcatcaggatgggtgccagtgtacgcggatcaagagcgaagattgggttgcatgagcatcggtttcctcctccaagatcggggagacagcgttgtctggagaggtccaaagaaggatgggatgatacggcagttcttggcggaggtccgttggggagaattggactatctcgtcatagatacgccacccggtgtgtccagattatgatgctctccgttatcaggctttagacgagctcactttcgcccaaaatcgcaggcacatcggacgaacatatttccctgttaacccatcttcatccgttattcctaccatcacctcttcggcctccaaccatgtattctcctacgcctacctccatcctcatttcgacacctcaagccacggctctcaatgataccttgaaatcgctctccttcacgcgcaagctgaatctgcctgttttaggcttcgtcgagaacatgtctggctacgcgtgtccatgctgtggagacgtaagcgaggtcttttcaaaaggtggaggagagaaaatggctcgagagcaaggtctaggttatctggggagagttcccatcgataccaagctggtcgagcttctggacgaggtcgtaaagggcaatatccctgtcggcgatgatatcgtcactcgagccgaccacgtgtcgctcaaagacgatgtagaggaggagactcaagcaaagcttacgacatcgggaacacaggatacagctacaacacctgtgtcgcagagcactcctttcccactgctcgatcgctatatggaaactacatcctcaaaaatctggaagaatatcacagcagatatccttgttcgtctggaagaccgcaaagctttggcacaggctgaaatgaatggcggcgacgacgatggctcgagcggcgaagatgttcaggagtgaccttttgctcatataatcatcattgtatcgttcgttagtatgtgcgggatatctatccattgcgcctgcggaagaccacctgcctctataggccctgaggcgtcgagtcgtgttcgtaagactctatttgttgatcgtcagtaggaaggcctgtttgacgcaatacgggagcggatcagtcgacaggtcataccggccactccgcaaaccgcgtcgtttccgcagttagcttaccttgctctctcgcagagagtatagaaatacgaatcccgcactgcgcgacccgaattcattcgcaagagcgcttcttattgatatggcgtacgcccgatcagtggccaggacaatctggacatgtttccaagcttcatcgtcgaacaaccagtcaccggactgcaagcacagctgtgccagcgtacgagccgggagatccatgccaaacacaggtaggcgtgtgtttgagtggactacgaattctttgactaagataagcgatggaagccacgtaagaccacatgttgtcacggattctccaaatgcaaacaatcaaccaactcttttcggcaaacatggtctgaaatgcgaacgtgacaacaagtcagcttcccagtaatttttgagggtgacttctacggccagctcaccttcgtgcttcgcttgctccttttttcgtcgtcgggtcgaagcagaatgcggatatcgccctcagaagagatgtcggatgtgataacagtagagtgtggcttctcaatcacgacagcttcgctgtgcgcagtgttcagatctatacgcctctgttccgcgatggctgcacgaagccaagcacatatctccccacgagagactgcgacccaagggaaaagaatatgatggcaagtatggcttcgaggcacaagggcgtcttaccttcttcttccgaacgcctcagtatacttcgaatcttgataaacggtcgattaggccggggtataagtatgtacctagggcgctcgtgttagctcataatgcgatagtcagcctgcatcttatcaggacctacaggatgttctgtgcctgacagtccaacacaacatcgtccagtgtcctgtcgtcatcgtactgaagatctgccgatataccagctctccagagttctccgcagacatcgagtcttaacccgagctggcgaggtccaaacgatgcgatgtagacatcacaccttgacggtgaccagaaaccaaaagaccgctcgttctctcgctctttagtcatcatccgcttggatatgccgctttcaaagcggcctacatggtatgcaatccgactgatgattgttcgagcaaggaggttcaatgcaggtcacaggggcaggtaatgttgaccttcacttactctaccagaatcgagactcccacaccataagattttgtgccttcgcgacgtgcaataggcaggctaaaacgctgcagcaaatcatcgtatctagatgaccgagaatgattggtcacgtacatacggtatccctttgtatcagagtggacttgccttccgcccagagcgatgagatctctgcgcttctcgcggcgcacacattcaaacataacaccgcccttatgcgcctaggacgatgagaaagcgacgaaaggttaaacatgaacaaggctgagagtatacctcagcggattcgttttgctgaaacttactcccgctcttctggacatggcaggtcgcacaaagattggacgcgttacccctaaagcacgggcgaacgtgatagtgtcgtggatctccgcaaacacaatttcgagctgacgagcggccgctggaaaaagcgccaagatccgttgacgaaccacgggcagctcgtctgcgcgaagatagtaaaattggctgagtcgctatgaggacgttgagaggacgctccaatcataactcaccgataatcagacactgcttcaaggtatcgctttgaagtctgcttagcagaggagatgacaatttctggttggtcgccgatacgctaattcccgttgcataatcgctgaggatgcgatgagctaagctcctcgcttccgccgtggtaacgctgtcgaggataacggaaaggatcgtctcatgggtaatgtgaatctcatactgcaaagctgttaaagcttgaaactcttgaatcaatttgtcaacgactgcataggaaccgagcttcagcgagcggccctaaatacccaaggcggcatctactcgccttcaatcgcctccgcttccgataccatcgtgcgagaaggcgagataagatcgtagttaatctcgcctacagcgcgtggctgacctcctgcagcgctctccgaataccgccaaccgaattgatatcgtttgatccgttcgattcctttgatgccaacataacgagcgaaagttaccatcccgtcggagggcagttgtatctgagcaggacagcagcgtttcgtcaatggcgatttacgcaattgtaaactttcatttgccttactagattgccttggctgtccaataagcgtacgacggagtgtttttccacatcgacactcgtcaaagccggcgtcaacagaggagtgataagttcgattgcgccgtggcggtcaaagagctgcgcgagacggtcttttactacgcgcgtccaagcttgactctcatccaaataggcgtccatggaatcgtaggtgaaatctaagacctggatgccattgtctgaaggcaaacgctccggattgaagagcttcgcaataagcgctgggtagtgcacagacgacgcgtgcgcgactttacgtatggcctgccaggagattctcagcgcctagcttcattcagatgcacttcgaaactcatacctcggcatagtagccttcctctcgcccttcgggcctacgaatcgaagtgacagtcagctcccccctcataacatccatgctttcaggccagacatacagtagcgaactgcgtaggagatcatcggcttcgggcctttcttccggatcgtgcttcaaaagccattcaacaatttgggtttgagctgatctttcgctgatattccagtctgtgggaaatctcggtcgaagcaatctgaggtttcccaagacctgtactctttccattccggacttcattgggtaacacatttcgaagaagatgatctgtttagcgggagtgcgaaaacgggtcagaacatttactactgatccaagatcaaggtgttatcacgtgcttacacctaaagaatacacatcggctttcgtcccatatgttcgcttctgaataacgtcaggtgagacatatagatgtgtaccgacgccggaagtcatatcgtttagactggcagagagattgatcccgtccaatatcggtgccaagttgttgtccgtagtgctcaagccgaaatcgcaaatttttacatttccctccatatctgcgtgatgatggtcagtaacgttggcaatcccttcgggtatcaactgtacgaaccgagtaagatattggagggcttcaaatcgcggtggactatgtgcaatttcgcaagataggcaagagcttccaggatttgacggaacagacgccagcattcatctgcgctaagtccttgagcaatggcctatagcaaacatatatgattaaaggaaattcaagcgttgtacttcagcaacatacctcttttagcgtttgcttctccacgtactgcaagtcaaaaagagataacgacgatcgacttccaatgagaatcttgagcagaagctggaaattggacaagcttacttacctccatctggatgtatagagttcgttgttgataaagatggcgatgtctcgccttgggtgatttcgatttgtgccgatgaccaaaggcctgccgcccgataacaaagtcgtcctcgacctcatcgtcatcctcttcagaagagtcgtcttcgtcgtccgaggaattagcgaaacgtatgcgtgggaagctcttgctgtgagacacagtggtagaactgatgtcatcgaagtctggcggaccaaatatatcgtcctcgtcatcccctgtgttgaggggagtgagttgggaatcggtagcagaaacttctgttacgtcatccccatgatcgctagcgggtttcgtactcgtctccagccaacattgaatatacctgtgcatgaaagatgtgttacccagagtttctgagaaagatgggtattccttgtcttacctgactataaaccgatgattgactcgcgagagcgattctgcctctctaaacaccttctgttcgtcgtcttccggtttcagcttgattttttctgttcgacccatcgcggcatgtcagaaaggtggccaacgttaccgacaaaaggcttgctcactgatggcgtaaaattgtttctgtgagatggtacacttcagcctgatagcacaatgaaggcgtactttgcttgagcgacatacctcaatccgatggcgagctttgacaacctgtccgaatcctccttccccctattgcgaacgtttgggcactggtcaagcaattaccaaaggtctccttctcaatcggagactcacaagccattcgacttcttcgaagtcgttgcgataacgcgatgccgggttgacctgcgtcttagatgaatcgtaatagtgagataggcctttcgtattgactggcgatcggaagaagctgtttgacaggggtgaggcgagggagccggatcggattgcaacgcctccaaaatcgtctcctcgcgaacgcagcagcttttgactagcttcgtaggcccgtatccgcttcttcggacgaggatcgagcataccatgcaaaacttcaagaaccccgccgtggggagcaaagtccgctataggacagcatggtcaattagcctcaaaatggctgccttgagccagctagtccttaccgttgtcaatgatacttccgagactcggatgttcaagcaagacatttgcgccatagagcatttgtaagaagcagagccccgcatgccatatgtctcgctcgggactgtaagcataaggtgcatctatttcctctggggacaaccttgaggtgggagaggcatgtttagttatcgaacgcatgcgtgtataaccgaacttaccatatttcagggataccgtcgtctgatgccgtagcgacgaaggggttggaccggttcatatctctgagcgtgcggacataggaacaccctgacaagctcagcaatggttgctccgtacgggacagcgagatgacgacgttgtctagatttaagtctaggacacggtcgtataaggagtgaggtgtgtaattggcatagcaagcattcttggggatccacatacgtttgtgacagatgcctgattcgtgcagagcttgcaatccgttcagaatctgcctgaggtgattcactgctacgccttcgctgaaggtctcgctagctctcagccatgccgagagggagccgccatctgcatgcttttcggtgagaatgtatatcctttctgcatgtgtagaagcacgttctctctacacaacgtcaatccatgccatattgagatcaacggactgcttcgcaatgttcttcgcaatggactcgccttggtcgcgtaaattgacaggatatgctgatgacggatgcacgcgacattgcgaatctccgccagaagcgcttcgattttgcgatgcccaaggggcgtttcatagtacggttgtgcgaaatcgaccacaattaacgagcaaaccggcggatcaatgttggtcattcgagcggctgagccgtctctttcaacactcaaagagtctcgcgcggcgcttgcgtgagacccttcgacgtcatacgtaacccacagcggatcggttttgcgaggaggaccaaatgcctgccatgtcgaccagctcccggggtaaccgggcagactgatcgaaccggtctggtttgacaaatccaggaagctgatgacccgctggccattctgcgactctaaccgtccggacatgtttctacccttgcgcagtccgtttgcgctgctttcttcctcccgctgccgctccagtctctccgcatcgtgagcgtcgcggatgagagatgcccgcctttcgtgttcttgccggatctgggcagccaatctagccttttctttttctgccttcgaagccaatcgagctgactcttctatttgcctctgcatcttggactggtcatagcagcaggagacacgttagtgtatggcctctttgacggattgtgacagcggtcttacttgtcgttcctcggcgtcacgcctggccttctcttccatgagatttggtgctttcgacgaggcgtgtggaaggggcaagtgattctcctccatgaagtctgtgataagggtaataatctgtcgaaacaattgcaaggtgttcggctatctggaaatcgtggtttaccgtctggcagacgtacgtcgaatatcatctccctgcctaagcttttcttggtgtgatcttggatctgcttaacaagctgatgcaagtgatctggccctagcataacagcatctaccagattccaactagggggatcctttgggtaattctggaacgtacaactatcaggatacgacttcctcatgtatcggcagggaaagaagaccgtggcccaccttcagtagctttcccttcaatgacacagcgactcgaccgtcatgagccctcaagcgtacgatccaccagccgctctcaagtggagtcccccatgccgttttcgagggagagatgtcgtgccagtcgtcgccaaagatggctcgcatcgcctcaagctcctcatgctgtatacgacccgtatcagcaccatccgcaccaacctgaccggctggtcgtctagacatgttagggcgcgggtccgaagtcaacgcttagcctttagatcgatatgccgatgctgggacccctcgcacaaggcgccgcgttgcgagatccgacacgttcatctatcctctaccggcgagcgaaggactttgcgtctatcttgccttgagacgggatgctgccgaaatgcactttgtccagatttggatacggctcgagtagacttatgagcttatgaattttgaatgagttggaggaagttctagcttttggatcatgattaattatcacgaggtccgagagccctcccgagcgatcacggcattattattcaattctatttacgaaaatgaccacgtcatatacgataatcggcgttcataccaactctgtctgtatcaatcaaatgtttgggtcggcaaacatggacacgggagcaattatacgcttccggggtcagatgatcacgggatgattattagcgcgtaagcgatccgcaggtatggggttggttgtagctagggccagtttcgttgctcgatcgctcgccaagtggtccaacctatgagttcagcccggttcaccctgacgactctctagccgtcgctggccagactgctgtgcctcattgatcattgacgactgagcgactcggtgaccgaaattatgcgcaaatgggcatcgtccgtcaagctgcgtcgggtcgtcaccgtatcaggtccgtccgaggttcgaacctgtgagcctagcgcagactattccatcatggacaggttccgttctccaggcccgaacgacaggacgcctggtcacgagtcgcgagtcgagcggtagagagcggcgcaagtaaagaagtctcgtcgaactaaggcttagtagctagccagtcaccagcaacagccgataagccaggaatgcggcgagatatcacaggaagaccatatgtctggtgcgtgtatatatatatcataggactgacctccctcaaatgggatgatgctggtcttccagcggtcagaacaaatttaggaccgatcggtggaaatactcaacgaaattagcgaatatttcagtatctaatcagtacttgtcttctggcttcacctgtttaccgaaatgcttcaggtaagatgatctgctgaattgtgggaaaatcaagctgaatgatatcttgttctgttgtatcgtggtctctatccgtgtgtagactaccggcaacctatcagtgagtttataaattatactcacctccgaagccgtgctctgaccgggattccgtatctgatatgtggcatccgttaggcgttgaacgtccaggaacagaagcttattgagagatatggcaaattgcccgccaagaagaacttcctgggtatcacaaaggtatgagccggatgtgctctcttggatctgggtcttcttcagcttatgggtcatccgcttgtttaacggcaggaacgtaaatacttcgactccggggattacaatatgcatatggccgggctcaaaccggagcagccatcgggcaccgctataccgacgcctgagcggtgcgtacgccatgatgctgcagacagaccccgtgccatctaggtgctgagcaaatacgatctccacaggctaccgcacatacagccgccttcatccgtcgctgaaagcacagttccacaggaggaacaagagacagtcaatgcgcgatcgacgccggtgatgagcgaaacaatttggtctcctgaccagcagcgtcttttcggctcgggtccgactgcagagacgagaccggtagctgtgccgcttcgaagcgctgcacgaagatcgatggacctcggaccacatgagcttggcttcaatcgtccatccgaccccttgacccgccgtcgaccgagcgtaggagtggctgatatcgctgttccaaatgcggaaacgtatgataggtgcgtaccgaagtgatgaccttgatagccaattgctaatgctttgacagacgtctttccagtcgaggttccccgccaaggatcgcaagcttttcccaatcgtcttgtccgccatcatcctttccaatacaatcccagtacgggtcaccgacgtcataccaccaagcaatgtcatccggacaagttcccggaagggccaactccttcacgcacgtccggagtggcagcgtctccggtctaggcagcagtcctgtgagaccaagcgcacttggcttcaacgtggcgcgagaagacagagtcgcgatcgacgaaatggccgtggaagactgagcgactctgggaatcttactgtataatatgatgtggaagattgtacaatcacgacaaggtcaaaatacgattgggcatttcacgaagaaatggacctgttgcaatctctagactgcgttctccttactcgcctgaatccggctgttccaactcccaaggagatcgcgaagatcgtcgctgaccaggtctcgcttgggttccgacccaattgtgctgacgctgccccttcgcttgcgcagagactcttgctccaatagaccggcttgtccagctcgaactagctcgttccggtcgacttcttcgaccatgctacggaacgaaaggaaaaggacttccgcttgtgccagtgtggaatcaagatcgatctgataagaataggtgttcaactgcctgatctagcccagcagctccaatccactatctgcgacttactgttccagtcaattgattgcagtatttcaggcactcgtcgaattcaactaggtatcggataatgacatcccgatgcgaatgcaagaccgccaatgcgataaattgctcgaacgaatccgagtagaaattcgtgaacaagacctgatcgatgagcaaatatcagcaacaagacaccatagtggatgctgagaccccaaatggaacatacatcccacaagcgaatcacatctgggaagttgaactccctcttgaatgcaatgctgattgacccattgttagttcaatcgtccgatgaccggctgaacgagcgcgacctacagcagccaccggaagcagatgaacatggaagtgcagttcgttcgctctgtagaagtcaaattcataagcatgagaaaacccaacatatatgtcagctacggacggaacactcgcgtacctagtttccgatacaattgcggatccatgacattgatgagttgctgaagagtgctcaatttttgccgcattccgctttggtctcgcaagaagttcacattctgtttagaacgaccggatttcgttaccgtcgacgctatcggtgccgcgatgcccaaaagatcgaagcagctcaccatttgtctcatccagccacagaatgcccagaaactagcagcttcgtctccctcatataccacataaatcggactgagaaggtcactcatgccttgcacatacccgagctcaggtgagtagacatgatatgtcatcaagatgatgcgcaatgctgcgatgtgatctagattcgaattcaaatcagcttcgcctcagaatcagccgaatgacgaagcggacccacgattcagtgcggtctggcttccctcctccgcttctctcgcctcagtgatctgaccatcacccgcgccacctccctctttttcttcttcgcctctcaggctcgatggcaccgcgaacatcggctgatccctgtcggtccttcgacaatccacctgtttggggaagcgaagagaatttggaagttcaggaagattcgcagtagcctgaggacaagtcaggcagactagctgatgatggaatgtaattgctaactcacgtcgattcggtgccattcctctttgtccctgtccacgccatcctcgcctgagtcggaccatctctccttgagtcgtacatactccgcaagcttctcgtctctcacagcttgacgtaacttggaggcgtgtgctgtgtcgcttcccagaccgatttcccaagcgacaacgtccaaaagtacttcccaagcccagcgtcttgcttctccaacagcaacgccccgtctgaaaacctcctttcggaaaaaggtttcattgaagcctttcgcatgccattcctggatctcgtggatcggaactgggcttcccgtaatcctggtagtcacaggcggctctcctccagctttcacactgcggatcagctcaaaaacccccagatcgctacgtgcttctatgcctgtatccgcagacgaaagacttcgacgtgccttcgcagacagttcggctttgcgcgaccgctcgccttcctcggcgactactcgggcccatctagcaaggtagacacgtgcggattcaaactcgccggcgacgttgctcttcttatcacccgtcttgcgaccttcccattcagacgaaggattgaccaagtctctgacaggagcgggtagatgtgtcacgattggctcagcaaatggctggctcaaaatatcttgggtgagccgtttggccttctgcgtaagttgcgaaaagccggaaagcagttgggtcctcgtcgggtgcaaaaatgttgcagtaggaaaatcgcctgtcgatgcgtagctatagctgcctgtggactccgggaaggtagctttcggtgggtacgcctttcgcggttcagagcttgagctctgctcatgctgggaggcgactcttggtaggacgcgttcgttctcacttgaattgccgagatcgatttcgtggacttcgcggtcgatcctgctcgggttgactaagaacagtctaggctctaagcgagatcgaagtatttcggcatgggagcgcaaagccgaaaacaacggtgttgcgccccaaggaacctttgacttctgcgttgtttcgataggctcggatccattggagccggtcgcactcgctgctagactggtactcgaccgggaggttttcaaaatctccagtgtcgacggagattcctcgtcgtgaaagtagaggctcggcattgacagtcctccaagcagactgttagcacaatgcgatcagcgttattgctcagccagccgcagctcaagctaaggacccacttgactgtgatgctaccataccattgaccgaggcttggcgcatatactaggatgctatagatctcctccattggtacactccaggcgtattccatctccttgcgtctcctgacctctgccaatttcctcgcgctttcccctccagagacgtcgcgacccattcctccatcgggagcgaattcgtctttcaagagttcgcctccctccgacacgaggagaaggctgctggcatcggtcctcgagttatcgttgttgtcagcatatacgctcggatacaaggcagtcgttttcgccggattggcggaccgcaatgaggaccgggacgagagggtgggcgagggcgaaaacgcggccgtctcgttcggcaacagcggtaggtgccctgctgcagtcgtaggaggcactgtcacgatcacaaagcctgtcaagcagagacgagaaaatgatgtaagctcgcgatagtggaagtgtgctatgcgatcggacttgccatcaacctcgtctccgggatccttgcgaatgtcttgaacttggtccatagacgattcttgcgacgcaaggtatgtgctctgcaaggttctgtctgccctctcggagaccttctggtatccttcctcttcattgagcccttctactacgctagatgggacccagaacagtatcatcgagggcgaaagaccggaattctgcgtgcctccattggcctcaatctcgggtttgacagacgctagccctaggtaacctggaatattgtcgtcccgcttcttactagggtgtacgaatacctggctcttgcagaatacgagctctcctttactgtattgattggacgagctttgctcccagggagatccaaagcgaaattctgagtgaaaggcaggattgggagattctaccttgactggcggcgcatcatcatccgtctgggctgcaggtgaagcacggcctttgcctttgccttttactctcggctctgctgtttctgttgcaggactagctgcggaagaggtagaccctgcgggacctgtgctagcggtattccgtacactacggaccgcctgaggctttggattgaggaaagatgcgaaggaccgactgatgaggtcgacgacgtcgtctgcctgtttcgaggaaaaactataagtcacatcgtacattacaggggctggacatgactcacagtccgaggatgcgatacgatctcgccttcgaactcgttgaggccagaaagacttggcttacggctgttggcacggcttgggattctgctcgcagggagactgatagagccttgaggcaagttgctgggttcagcagcattggctaacgaggctctgcgggatatagcttcgcggcgcctgttgtcatcatcaacgtaaaaggctgctggaagtccaaacatgtcgggctgcagaagttcgaggtgtcgatggacttcagagagcgcgattctagtcgaccgtgaaacttattgctgcgcagtgactgttagctaccgcctgctggaaattgactactgaattactgactactggaagtaagaagtggacctccgtgggcgtagtggtcttgatcatgtagaatttcgtattaggtcaaccagtcatggaagtgtagctgtgccgggtgtcggacctctcgctctcgaggcggatgcgatgcgatacgatgagatcaccggatatcgaggaggtgacggaagcaaaacggaaagggagatctctgcggaggcaaatatggcaatacagtagctagctaccactggcaagagccatgcggtttaagaatcaacagctttcaaaactgacgcctgtgcttaccgtcccaaccgcatgactttactccactcgacagccacattgacatgtatgaagtcgaatctgtcaaggaacataagcccttttagggacaatctgcttaacgatcacatttgctaaccaggtacctagaagctggttgattcccttgcgaacttctatccggcactcgactctccttgcgttcgggttcgcgcttcgaatcacgaccagccttggtcttgctcgatcaagattcgcctgctgcatagtgacgtcgcatagtcgagagctccgaagtggacccgcgaaattcgagttacgcatgccgaccggaggcgaacgatcgacgagtttgacgtgatagatttgcttgcaatcgtttgccatcttctcgattctcaaggaatggcggacgagaacccttcgggggatcaggcagatgcctcgttcggtctcgcgaacgcatcacttgtagcaagagcccacgcattcttcggcagtgcttcttctacgagtctgggtagcaatcagagcaagagtcaagcaattcggagtagtcctaggtcagtttcttgcctctgatcgacgatagtctcgctctcgcttaccaacactggacggtcagtctagtccggggcctgaggaacgcagttccagccagctgtctccgacccaatccttcgccacaaatttacagagtgatagcaaatataatcccgaaaagaaggctgccgacccagatccacctggtccactggatgcaagaggaaccagtctgtcatctgcaaatgatcaagatcgccagattggatcctcttctagagttacaagcatgcgagcgaccatcaggcgtcgatctgacatggtgtctttcgaagaattgctggatgagtctgaaggacacggcttgagggcccctcgtgaggatgaagttccccccagttcgagccctcctgctgaggacatggtcagcagacacaaagtcctcagactgttaccgtgggatgggggagcaaagctgcaaagaaatgctcagtctgagtccttacattcgcctgaacacagcctcgatcgtgctcgtgttacgcttcggacccgattggctgcacaggacggagccgaggccgacacagatacagtgcaagtcactcctgcctcgagggtttcagtaccaaccttaacaaacgatcaagcacactgctctcagctaccccgggtcgggattaccagtactgagcgctctagccgagagctattgcgcagcgatattccttctgagagacaccgaagtttggacttgaatgtctggcacggtcgagttgaagaccatttacaaaccacgcagacgtcttccaaagattcggaatcttttctagaatcgagagaccgacagctgtcgacacgctcagaacaagggttacagttgaccgacatgttgggtggcatacgtgccacacgaatgatcgacagccaaaaaatcggaaccgaaggaccttcgagcgatgtcgtatcccggtcaagtaatctccctcgagccactagcgcccaaggctaccacacgagtccgggccttacggaaactgtcaccacaagatgcacgaattcgcctgacggatgcaagacaatagacaagtctcatcttgctcgctctcgccagcgttcgacacataatcacggttctgatgcgagccgaacatctcggttgaacaccttgcccaactacaggcgccttggtcgtactcgagagctatctgcactggacccacacgattacaaggcgacgcagcaaccgaaagctacgtctccgacgcttcttgaacgtgctgcgggtatcaaagagaatccgggcacggagcgcaaagaagctgagccccatccgattaggacaggcttagcactaggggtgcaagatcatcaagagaatgcatcccgtaccagacgtttgtcggcgaaagtccgagcattccaggacaggaacaccaacagcgacagcagtactgagccagaaatcgaaggcgatgagacgtatcgtccggcacaaccgattatacgaaagttggacagatcgaatcacgatagccaatcaagtgaagcaggctctccagatgagctagctctagcctcgaggaatccttcggtttcacgcaaacggtctggcattcgtcaggagcgcagaggggggcttggcaagaagagaaaattgaacaaccagacgacgtctgtgcagctcccatcacggaccgaaacaggccacagcagagtgtttgcaagatggtcctccgatcgtgccttctaccctggatcagtcaagggcgtatcggggaaacggttaaccattttcttcgatgacgaaacaactgacgaagtcgaatggcaccacgtgaggaagtgcgagatcaaggcaggagacgtagtcgtcgatctaagccatcgtcccttcaaggatgtgactgtgatgaaatctgtccatggcccgcttcaaccggccggcaaaattgcggtacaacgcggcagcacgtcgtacgaattgcttactagccagattcgtataagggagaaatggattgcgcagatggacgatcgtaaggttcaatttggagacatagctgtggatccggtctggaacgactctcggacgcgttacttaccggaacaacaactgtcaagagcgacaactccgaatgccaagggtaccaagcaagccagtgtgacgtcgtctcctggacagacaaacaggaagtttccgggcatgttcgatagcgttggcttcctgatcaccagtccgagccacaacgaggagaacaggaaaagaaaggtagcgaaacgcatcacttcgcacggtggcgtttgcgcgaacgagatctgggacttctacgagaagacccaatttgaacaactgtcacagggttatacatcaatcaagttgaaagactctgctgttatagcaggactgaagggcgtattcctcatagtcatcggaccgcctaccttgactccgaaataccttatgtctttggcactgggtgtgccgtgcttgtcagcgaattacattgacgaggctattagctcggtaggttagctgcgaatagagtctgctaggcaatactgacgggttgtgatggttgacgattagggaagtgcctggaacagctttcttttgtcttctggtccatctttatatttggaatccgaatgctctcaattcgtcgaccccctttggggcacagatccagcgatcttacgtcagaccctcgacaaccgtacggttgcgcggcgaccattctggggaaaagaaatcatgattatcaaggacaataaaatgaatgtgagcagaacactacgacccctcagccattgacgaagtttgacgtcattgatctcgattgtaggatgtcattccgtattgtatcgcggctatgggagccgagcgggttactgtgttgacagtatacgagcatggcataactgatattggtgatgttgacgccattgtcttcgctgataatgcagttcccgatgcgatcttcaacgcacgcaaaaccgccacggtggaatgggtaaaacagtgcctagtgagtttccgcaatggcggcggaacgttcgtgtgactggactgatttattcctgcgcacggacttctagatcatggggatgttccagccaccaaagatttacactaaaagagagaagtgataaacccttatcttgcatggcatacatatacaaacgtgccttttcaggccactgtagtgtcctcgatctcgggatgacgttcgaatactcgcgtttcaccaattgccatcacttggaaggcgtttgccgggatgtccagcaattcttgagcagctgctaagcgtctgggaggttcgtcgattggttctagagttaaaaacgctagatgtaatcagccaagtcgctctcggactgtcctcaaggtaaagaaccgacctgacgttaagcgccatgcgccctgcgattccgtttgaggaggacttggtcaggagctcgtcatggctgagaaagggaggtgctcacccagtgcgcgccgacagctgtcttgcatttagtatccaggaatactcggacggaatcgataggtgcacagtgcaccggactcatgaaacctcgagggtcataagcgctgtagggacagagaatcagcatgagatacgatgacttgactgaggcggaagtgggaaaacactcgcccgatgggtatgatacccaaatcaaaacccttgaacttttctccgatctccttgaaagctgggcaatatggccttgcctcgtcgatgtcgtgactaccatcctcgactgcgcaatatccggtgtcacctccaaaccatacctacgagctgtaatgtaagctttgtgaaagtcgaaggtcgagccggtcggcctaccttcgtgagaacttttcctgtatccttctgcaaaccctctactgcccagctggcccatagcgatgcatttctatcgaataacccccttccgctaaaatgctgcgcaggcgtgcaagtgatcttgacggaaccaacatcgttcaccaccattcgacgagaatcccaccagtccagttcatgcacgtggtaggcctcctgcaaaactgtcggtagatttcgcttcgtattcaaaggcaagaatagttgcggcgcctgtttcccgttcgtaagcaattgtgatagagtctctacatcaagatctatgagacatgatatttcagcttatctgcttgaatagacgggtgaggtggaagctggatcttagacatacggtcgtaatggttgtggctgatcaccacggcatcaacttgaggtatctcgctcacggcacaaggtgccttggtatacctcaagggaccgacccacttggaaggactgcatcgctcagagaaaacgggatccaggaggatcctgacccctcgcaaaccaggcttctctggaggatattcgagcaggaaacatgcatggcctagaaacgtgaccttgacgaagcaatcgttttgtgggacgagtccagctccaaagtcgggtttcatcgtaggtacatgctgtcttgccgaattttccaactcgactgcggaaggagctttggcctgtaccttgtatatcattgacgctatttccgagacaccctgttattcggaagatcgagatttctcagcgcaaagagccttaagaatttcgggactgtgtaacgctccacttacgacgtctctgaaactaggccaggggttgacaaactttgtaccgtccgtattggcccaatggctcggcttggccttaggttcattggaattctcgtcttcgctggtcactgtcgttgcgagcgccaatccagtcccggcacttgctgccagggtgccgacaggcctactccgaagaagtcgaacaaatcgctgcataatatcgagtaggaggagatgcggagctgaaggagctgaaggtgacgggccacttcaatgtgccttgcataagtcagcgcatagaaagcgaaataaatatggctcaaaacgagacctgatggctatgtcaatacgatcgaggtaggtctcgggcactactttatctcgaccgagagtacttagtcgcgctgctttcgcgttttacgctgtcgacgcgtacgcgtagctagctagtctcctatatcttcctctttgggaagcacatctctgtactatgctagcttttgcctccatcatcatcatctctccctctcaacgcgtcatcggttccgttcggcacgatcggttcaacgccgaactgaacatgttcacgtggtggcacgggtgcaacttgccatgtctcctactcctatattattactaattactactatcgatgtttcctcgtagattgcatcctgtaatgctgtgacctgtgaccgaggaacgacagtcttccctccgacgactctcactgagcctttgttgggtttggctggtcggttctggagccgaaagggccaggcggtcctgacttgatcgagccctgggagccggagttttcaaccctgaggcaagtcacaaaaccggtcaaggagaaatgtttttgctgctatataaccctagatccactgaatggacgagcttaggataaaatatgatgataaagccgactttcccagctacgctatcgttggcagcgttacggaaacgacggacggaaccttcatcatgcaagttgacagtactcgtttgcagttggccccttttcacggaggaatcgccatcataggtcctgcattgtatgatgctgcgcaccatttcggtataatcaagcaacctaatgcgcccttccatatcacactagtcactgcgtcagagctcaaggcaatcggaagacacgagctggcccacttggacgtgtcgctcgagaagtcaaatatgctgggcctcgtaacccgcagagatgtccggttcttggtcgtaatttggaatcatgcagacaaatggcgacagtcgcttggactggagaagaagcactatcatatgacgactagcgacaaagacgaccacggtatcgtcaaggggatcgaggcgttacttgccacgacagatcgagacaccatcctcaacaaggtgatcgtcctcggcgaagatgccatggatcacctggtaacgagttgctggaacaacatttcttcggtacgtacgcttccgcttgcgctgaatgaacttgccaaatagccagctaacggctgcgctattgacttagaaacaatacttttgtcgccaattcgctgtttcctttccaaactcgttcaaagctttcctacgattagccgacatcgaaccgggtgccaaattgcaactgctggccttggctcatgcggcttcgctcaacttggccgtggtctcgactatttcgacaagaattcgcaaattaaacgggttggcctcgtggggtcccgtaatcactatggcagaggtcgagaccatcccaagtgacattctacccgtcttgatgcacgagttcctgccggatctctcgcccatggaactgtggctcactcctactcaatcgcgagaacggtccttgttccttggtacaattggcctgccccgcttcttctcctgggtatatcccgacagaatagcgggcatgtcgacacctcgcaacaaagcggactgcacgatcttaaaaagaatgggatttacgcatgtccttagtttgaccgaggagagtcctctggactacgcctggttcgctatgggaccccagcgactttacataccgctgtcgaattacgacagcccgacactacaagaaatgaaccaggtctatcatagaatctcggagggtggggtctggctcattcattgtggcggaggattgggaagagccgggaccgttctcgcttgtctcgtcgcgatgctgggaagagatgggatcgagggaattgccccttagctcgaggcgagcgtagcggttgcacttgttcgccaacttagacccgggtcgatcgagtcttctaagcaagagctgtttgtcaccaaatgggtttcgcatcgctgggctcttgcgtttcgcaatgacaaaatcgcggaaccgagcacttcgctgcgatgcggaaggctttgtgcctgaatcgggcggagctgttttgtttttgttcggcaagcctgggtcaggaaagtcgtggttcgcatccgctgtagcgaaacgtcggtcaccgggaacgactattgtggtcagtcaggacgataccggctcccgagcagcctgccaacgcgagatttcgaggcgggaccgactcgaatgtctactcatctttgaccgatgcaatccatcaatccaggatcgtcaaatatggttgaggctcatcgaccgaccttgcatcgcagtctacttcgattaccctaaagctgtatgccgacagcgcatcgatacccggtgagaccacctcactatccgtgcaggtcaggggtcacgcgcccttgatgacttcgctgaccagatgcagcctcccgcgatgagcgagggtttcgccagcattgtgacagtgaccagttttgctgcctcacgagacgcggtccgtctcttcgccaaagatcctccgctcctcaaatatccccggacagcgcacctgatgaatctgggctcggcttcgggatatgacatcgtgttcgagaactttcggaacataactggcaacatcatcattgaagagaagattgacggggctaatataggattttcattaaattgggacaaggcgattctttgtcagaaccgtttctcattggatcgcgtcgaacgatcatgcgcaattcaaaccactggatcgctggatagatacacacggcgaagcgcttcgcagagtgctcgatcgagacaagcactacccagagcgatacatcctatacggcaaatggatggttgcaaaacattccatacattactcacacctacccgatccgtttatcgcctttgatctgtatgatcggcttacgggaatgtttacgtcaagatcctgcctaacgcacgcactgtcggtaaccgatatacatcaagttccgttgatcgcgcaggtccagtcgataaatgaggaagaggtgtgggcagcgctggaacgggagagtgagtatgctccaggctgtaaaattgagggtatctatatcaagatggaagacgcaagcgcaacgagaactgtggaaaggggtaaagtcgtccgaggcgacttcatctccacaactgatcactggactaggggtcgcttagtaaccaatggatttcgttccaaaacggcgtaatcgaataatcgaggcgcaccacgacgtggagctcgtctaggcacctttaaattatgtgtaacaatgtttgcggagctatcagggaatggggcttggtcccgcatgtatttactttctgctgggtgcatgtgactatgccgagaaaccatactactctaagagatactgctctcgcatctcaggtctgggtgcattacggagcgctatcagtacttgctgtgaccggtacatggcttttactattacccctggcaggtctggtgttagactgccagcagtacagtacttctccgggacttgtaaggtagcacaaggactgatgtatgtgataacagatgatctaaactggtacaaggtaacggggagatgtattgtaggcctccgtactgatgtcctttgtactgctccgctggaggtgtcgcgcggggatgccacaccggaggtgtcgcgtgggggtgaagaatggaggtgacatacatcgtaccgcaggtggctctaacacctggtatcagcgagagtagagccaaaaaaagtttccggggaaagctgtcataacggcgagattgaacagcaatcggaaaactgcgcaatggtccagtatcatacacttaatcgaccaatttcaccaggatagacagactatagcactactcaggccttacatgtaaagatgcgactgtgatcactcatttgcgaccacaatcacatcttgcaactcctgtcacactattgcaactcctgttacactactgcaactcagccacagaactgcgactgtggacactcatttcccccaacccgtctggaaaccgcaacgttctcccctcggtcaccgggccaaggtctcgaccgggcggccgaccgaccgaacatccgacacctgcctgtacttgctactctctctgcaccaccacactgtgtaattcgaggatacatccgttgttacgcagcagggagggcgcagaagtcgatcgcgatccgggtcaatatgcaaaatgtgtcgtggtcgtcggggcggggatgggggatcagctgatgaaagtcggggaaagccaaattaccccagataaccaacaggcccaagacagaacagcagggggcgcaagggacgaccatctcccgagacatggatcgcatggctcgtaaaaccaaacgtacacgacgagatcattcgtctcaacaagggtggtccaactcatcgctgatcgcttggtcgagcaaattgaccggtgagacggcgactttcgagctcgtcccgcggcggatgaggaaaggtcgagtgcctcgatcgcactgccaccctttcccggaagcaaaacccgctttgtatgggtgggaagatgagagcttcgggttgcccaggtattcccacgatcagccaccagagacacatcctgtgaagcttggcagtcggacgagcgggaaccaggttgctgggatgatcaggtgattcggtcatcgttcagctctatgctgcttgcagggatgacgctgcgagccaaactcagagccgtttctcacgctcaaagaggtcgtgtcaactcgcatgagaatctgacatggctcagtatgagcggtggacttgcacttgcgccccgtaagacctctatcgatttgaatgcgatcgtacccaacaggaaggagaactcagttacgacctgcggctgttagaacgagcttcgtttctaagccgttacgtcgagccgagcggtccaattccgatcgtacttcgtacaacgttcgggaaaatggtagttaagggtccttatcatagtgcgcacgattcagcagcctcgagatgcaacatttcgggggcgctggcggtatgctgcatgtcgttgtatcggtggagagcaggttcgcttgatcgccatattacgcgcatcggggccgcttgatcgcccacacgtgatatcagacaaaccgcactgtcagccgggttagaaacgatagcttgtggatgttgacccttgcggttgatttcgatcgagctcctccgtctgctagcaaggaggtcattgtataggactgagacctagcttgccttgcctgtacctgcggcttggccacttacgtttcgaatgggaagggtcggatggaatcatgtctttcggttccgacatttatcgcggacatggactgcaaccatttcttttatgtccgtgtcaactttcggctgcttatttaattctgattccgtatggaccatctcatatcaatcgactatttccatccatgaataaagtcctccactctttcgacccattgaaagctcaagttccgacctcggtacgaccctcgatctcgatcttcaacgacgacatttgactctcaaacgatttgtgccagacagaaatcatggccggcaagacatcgacgacgagagcggaccgggtcggatcactcctcttctgcccggcttgcgggaccttgctatctctccccggtgatatggacgagatcgcctgtgaacaatgtggacgacgagaacctgccagttgtaagtcagcttgtggctctcggaaagaccgccagcgttgtgggtacgggtgctatcgtaaggccgagcatgctggtcgggaagcgatgcactagctgcagatgaggatgccgatcgactttctccgggacatgatcctccccttcaaacgcacctagcctcagtcaatctctgtcgtcccacgagatctttacccatgttgagccctttcactgatcacgaatctcctcaacacgatgcgcatcgacccacagcctacgagaacttggacgtcaagacgtattcgcatcccaacgcctttccctcgtcattgcgacaaaagcgagcgctcgtccagggtcacaaggacgatggaacccgtcaaaaagatgaagacccggtcgtacgtccaacgctccacctgcttggcggggatcgtcgcggtcgtcgagaacgtcagctgatttcgtctctgacatgatcctcttgcgcctcgggatacaggtccaggaaaagtgcgagaaatgcgggcacattggattgtcgtacaagacgatgcagttgaggagtgctgatgagggagcgaccgtcttctacaaggtgagtccgtttgcccccccaaccggtgcaatgcccggtcgaggcgtctcgctcgatgggcctagggggatcatcgaaacatgcctagaggtgctgatcaccactcgtcgatcgtcttcgccggtattagtgtttgaactgtggagaccagactcgattaaacaattgaaagagggacatcgagggacgaatctgctgcagaatcgcgcttccaaactcttcttgcaacgctcgtcgcgtcattgcggtgctgctcccctttccctacatttacataccatcactcggctagtggatggacctcgcatcgactcgtcatttgtaccttggatcttgtgtcattactattgtatcatctgtttgtggaccataatttccccggtcgaccgtgttggtgatggctgtgtgctgtggctgtgtgatgacggggtttgcgtttgttgacgattcatacttcccctttcgcgtctcgagaacgaaagttgtccggtcatctgatcagttgttgagaccatattcatatccttgtcaagtggtcactagctcaatctggtcagaggtacagcatacctgcaagcaagcagatctgaggcgtcgtactgtagtgataatcgatatcagcatctagacggaccattcggaagaccgagccgtctcgcagggatcgactttcaaaacatcaaaacaccatcaaacacagcatctcacctcgattactggtggtatcatgctcctgatcgatacacctcccggcatcacggctgccgcatgtctcgccggactgagtctcctgaccaatacatccgctcgaccagactcgcagcttcactcgacatcgcaccggctgatccctaaacgagcaagatcctcctcgttgatcaaacgggccggcgatgagtacgtcaagccgatgttcaggctgggtctggcagaaggcaaggaggtcgaactggtccatcgacatctggatacagctgggtcgattcgacaacgaggctttgagaagagggccgagggggatgaggtagtaggcgcaattgaagacctggaaactcgctcagggtgagcagtcgtcgaacacatctgtgaatccagtgggctgactcccttgctggactgtgtcatagaatctacatcatgcctttgaccgtcggagaacctcccaagagctatccgcttcaagttgatatcgcttcctcagacattttcctctcctcatccacgcaatgcagctcgtcctcctgtcctctcgtcgactcgtcgtacatctcggacaacttttacgacgagacatcgtccacgacttttgccgcaatcggcgggaatgctaccaccttcaacttgacattttctgatggctccttcctctcggggtacatggcgagggagaggatgagcttgcaggtctcgtctacggggagggagggcgaggtcgtcgtacccgatcaggtctttggtctgatcaacgggagcaacatcgatatggatgccgaagggatcgtcggtatcatgggtcttggatttccaaggctctcgcagttggcgaggatcggattgggaggtggtcaggtggtacaatcggcgccgtcgtcctcctcgtccacaactgccgtatcatctaccaggagttcccagccgtcatcgtcaggatcttcgtcaacaccaataacgaataccgcgaccgcctctgcggcggcttcatccgcttccacgacttcgggcggaggcgcattcttctcgatcttgccaattggcacgatctcctcagcgacatccactcagacgggatctttgagtaaacgtgccgagactgacgcgccggattactacccccccttcttggaaagtctatttaatatcggcagcggaaacctttcggccggaacggacatcttgtcctacccagtcttcgggctggcactgtcaaactcttccgaaccttacttggaaaggacggctcggtcgtcgatcacctttggcggggtctcgagcgactatgtcttgcccgtcaacgagaccacaagagggagcggcaggacggtggatgatatcgaatggcacgacgtcgtcccatacggacatgtcaacggattgaacacgacgagtcaaggagacgaattttcgagggtagatttggagctggagcaatacttgtactggacactcgaactagggcaagtcacgatgaacggaacggacgtcgctctctcgccgacctataactcgagctttaccggattgtcgggttcgaccgctctccttgacgtcggcactaatggcatatttgcgcctcaacaagacgtcgtcgaactgttctcgcacatcccaaattcgcgacaggtggccgagggacgatgggcggtcccctgcgagacgaaacaaacaatgacttttgcctttggcgcaaacggaggccgggttatcgaattgcagccgagcgaatggatgtatgctcgagtttcgggcagctcaatgtgcatggcttggcccgtcgtctcgcccccaaattccgatgccgactggcaactcggaacacccttcttgcgaaaggtctatactgtcttcggatacggaatcagtggagtgcaaagccctgtcgtcggctttttgcccttgctggccggtcagaatctcagttcccgcaatgtcacgaacggtactacaacaacttccgggaatattggtttctcatcaaatcccactcctacaacggttcaagacctgtcccaggtcgaatcccttttgactgcggtcatccctacggtcttacctaatgtgctattgccgaacccgtcatacaccacggctggctacattttcaatacgtcggccggggttcccgctccaggggcattgcaaaccagcggactggcaaatgcgtcccactacagcgtcgggcaggtaccgatcgtgtccagtgtcatccttacagtctctaggacgtctagctcgaatacagctcaacagacccggactgaccagacaacgaatgctgggcacagcatgtatttccaacctggcgttaccttgactctcgtaacgatcattttcgccttgatggcctgtctgtgacgagcttataccatgtaaaaccgatgacatgcgctgaacaaggttgagcttgacgattctgcgattgaacccggttcagcgttgaccctccccgctcggaaaccatcacgattcccttcatggcggagccttaaagactctgccaacaagaccaagcagtctcagaatagagaacgcattgaccatgggcgcagtgtcccaagaggatctaatttgccggatgaccgagcaaagccagcgatgtctccattctgatgctcatcctttgttcggtcagtcactcctcgcagagggctctgtagtcttatcaccttttttcatcaccttttctcagtctgccacctttgacctgaagcggagattgttctacaaaggagaagtcgcgcaaacagcgcctaacctgttagcaggcgggatatttcgcgcagatcgctagcaacataaagcagagattttggagctgtcaacatctgcaataagaatcaatacacatagctactgcagcatattccagatcacttcaagatgccctacgagaatgacccgcatcctgaaacggtcagcgatcagattgtaagcgcgtccgggacgtcgagtgccattgcatctgacggaatcgacggaaaatcccaatccggagctgatcacacgtcggagacgtcctcgctcctcgacgaaattacaagccttattcgatcatcactgcagaaggccgtaacgatccacatctacagttcggggccttgatcgaaaagatgagccgcaagcaactaaagcctgcgcgcggaatcgatggggatcaaacgcagacggttattcaacatctcgaccagctgaactaaggctttcaggacgaggctcagcagttcggattgaccgtagacgaatcggagaagctcttcaccgaaggaaaacaagatgctgagcgctactttgacgctggaactgatgagggcgtgacttgtcggcagcaggaattagtggtttccaagaaattgtgacctcctgcgcagaaagacactactccatacttaacccggaaggagagtgagggtgtcactgcttgggagtcatgaatgataacggatgatcgctatacgaatctaccctcccaataaagtcgtttctatgagcagcagtcatcgaccgaaagataaagcgggactgatcagtttttactcctgctcaagtttcacataggtcaggaacgagtatctgaggtcgcgccagtacctgtgatcgatttacaggatgcgcactcggcctgaggtcgctatatcccacgttcgcgctttcaaagcatccgaacacatgattcggggaacaagcagcgtgattgattaagattgcctcctttgccgacatcaaacgccgacattactcaccacgttgtgggtaaaaaaaacacgtgtgtgcgaggctaatgatgtttcttcaatcacaaaagcttttactctatatcctctcggtcgccacagcggtcagtcagcgttgcccgagcactactaagcctgatcgtatttaagagatacatgcagtactttgtcctcggtcgcagggcgtctgggcaaaccacgagcagttggtacaattcaggcctcttttgtaatgtgactgccatttaatgtccagcataaagcccacgttcgataataggtcaatctaaatatgagtgtgaattttcgtgctctttcctttttgttggcggtgatgatattgcaacgcttccactggagaggatcctggcattgtatttagactctcttctaccatgagggaatacatacaactccaaaatatcgtcaggagggatcagcaaacagtcttgtctcctcaagcgactgacatcgcgatgagaaatcctctatcggccaatacagtccgccgctttactaaggcgtcttcggacttcgtccaaccgactccatcgatgtccagagaatatgccgctaaggactcgacgattcctctctcggctgactccttgaaagacgatgagcttgaactagggatggctcgatcatttggcccagtgacgatccgtttgtcccagtgtgagagcgagggaccggatgcttctcagacctcgagcggattcaagcgcggtttcaaggagcagagaaagtctgaaggcggaggtgatgagatgccgccgtataagattcaggtcttcgagaaggaaaggcttgcaccgagcgagcttgcttcagatacctgcttagatcgatcggatgatccaacggaatgcgggtccggagaagaggcgggcttgaaacgcgtgaaggacatgctcgaagatctgctccaaccatcaggtgcttcttcaattaaacaacctgacacgctacatccatcgcaagctctccgaccgaaaggggcaggctcgcgtgcgcttgttccaggtctccaaaacattgacgagatgttgcgaggatacgccttttcgccagaagaacgctctagtttcgtaaacaaggccattatcgagctagagatgcgtgctttagagcaattcatagctttgacggaaggagatgggttagaaggtcagagggaagcctcaaaccagccgcgaaaagcttcttagtcaggtcacggtcgcatcgacagcactgcaaaagagagaaacaataagaagttcggtcaacggtaacgcctatgtaagattcggttgtgatgacatttgtcgccgatgcagagtttatgctggtatgcgctcaattagtcgataatgctgtcctgatgattaaagactataatgcgtgactcgggggacgccgcgtttgacatgctgtttgcggaaccatcttagcctacaggtacccaggcatcattatatcttctatagaccgagcgttctaacgaagtcctcaatcctacagcagaaaacgctcacttacgagaccgagactgatgacagctgaccttcagtctcaaacaaagcgatcatcatccaagcatgtttcaggtggaagtgcagcgcttaccaggacgcgcttccatttgacacccagttttactcacgcgaaacggcaaagatcgatcaaagtcggttgatttcgagtaatctaggttcgagccgacctcggttgagctattcaagccatcgagttagccatcaccttcggctttcaccattatagagattcgcatcggattcaacgaatcgtctccaagatgcatagtgttagtaagcgatccactggccaagccatcaagcagattcgaggtaagtggtcttgaactcttggttgttcccctagatcgttatattgactggtctttgacttgttcctttcacagcacttgctcgatccgcctcgaccgatgctcaagcctcttccagctcatcatcagcgaccaacgtcaaggcagctatgttgattcaccgagctcccctccttacgcccaccccttcgccgttcgaccaagcctaccaccaatattcctcctcgcttcggctagccctctcgaatcccatgcccaccgaattctacttcaagaaggggtcgttgacagagaggaggttctcccgagctcagtggcagcgggagaaggccgtattcggggagaagcttgcagggaaacagccggacgtgggggagcttccagccgaggacgaggtcaagctgaatgtgcgggaaagcgaagagaacgtcagcgatgtttcgtcggaagctgccaagaagctcgagaggaaaggggatggaaacctgtacttgctggtcaaggagaagaagagcggaaagtggtcattaccgacgggagagttggctgaaggagaagctttgcacgaggtgagccctcgaccttccgcgatcgcatacgaggcatagcgtggatactgagcacgaacatgcgcttcaaacctcataggcggcatcgcggacagtagcgaagcaggttggcgaggacatggacctttggcttgtgacacggaagcctgttggactcatagaggagggatcggacaaggtaagcctacagtctttctttgccgtcggttccccagctgagccgtttccttttgcatcgtttctttcagacttttgtgttcaaatcccatatcttggccggagcaccgacgcctgggccttcgtcatcttgctcagactacgcttggctgaccaaggaggagattcgacaggctctgggcggtgaagaagcggatgcgggtgcggcagacggcctagattcagagtcgtcaagcgagccaaaatcgatgtggagccaggtcgaggcgcttctcaacgcatgaggttgacgacaatgtgaacaatattaataccatacaatagcgaggcgatgtcatgtgcggcgatcaacgaaaggatcatcaatacctcacaaggccggcaccggtccagaaggtacctgctccgtccgccctttataggcgggaacaggttcaggggtcttggacagttccctcgtcaactcgtctggcttgcccccgactaaccctctcttactttcctcgacggccatctgaatcgcttccttgaaaggcaactgtcggggagcgaaacgaggaatcgtgctgggcttctcgaaggcgatctccgcgaccgagatgaggacatcgctcgtgagacctttctgcgaatcgttacgtgcgtgctgaattgccatgatatgccaagagaaccgtgagctcggatgacttacgaggggcgtcttgggagttcttagccgattcatgcggtactcgtattctccatcgatgagccaactgacatccgtcttggcctgattctcgaaccatctggtgtcagcaacaccaaagcggtttccttctagagagatgctcacgtagtactcgtcttcgtacggccaatcttcgctccccttcttgctgagcaggctttgatctccaggccactccgccgtgagacaatactcgagcggtatatcaaagattgctccgacctcctcgggacttgggacgaggctctcgaccaaggcggggttcgagatcaagtatacgatagctgaggctttcgacgtcaacgatcgggtcttgtgggtagttacgagacgactcacggaacacaacgagcttgtacttcgataggaagggctcgagctcggtcatcttgtggaggtccgggtgatagccgagaggaagtccaacttcttcgtatgcttctcgtctctgtttggcacgatgatttcagcccgggcggacctttccacaggtctcaactagtactaacagcagcatagtctgcatcgacgtctgtcttgtcgatcttcccgccaggaagggcctggttcaacatggcatgagattcgtcattctgtcactcccggataaccgagctggaaaagagcgatcactaacggtctggtttgggtgagacctgcgtcagatgtgggatcagtgataagtgtcatgagctgtatcaaatcaagcgctcacctcatggtcatcgctcgggtcgtgagaactacacgtagcccatccttttcaggggtctcgtagagcgcgatgagcaccgcagctgtcttgagttgaccgcagctgtccagagtcaatcgttagattgcgtcaagtatgtggaaaaggccatagttactcgatattggtgacggctttatgagcctgcagttgcctgatacatccctgtgctccggagctgaaacggttgaggatatcttgggggagtcccgatgcgtccttaagggctagtagtgcgagtaatagactgtctcgatcagtccagcttcatgttcaccgaaaatcgtgtcaacagcgagccactcacatagtcctttccctctcatgttgttccctctttcgtctttactggtatgcatgggagacgcttataggcgttttggcgagcgagaggttggtcgtttcttcttcatcgaggtgcatgacgtccggggcagcgactatccgcgcggagccaagtgggtggaacatatgtattcgaccactcgagtctgttcaaacggatccttgcaagctacaagcaaatgcggccgtccatatagtgcagctggttcttgccttccttgagtgaacataagagctccaacgtatctcggtatttcttgacgaaccggcctactcgccatggcacctggaggtcaatcgatcgtaaacgagctgatcagagcagccgcctcgataccgcaagatattaccgatgcagagttggacaagcacgtcgctgaattgctggtcaaggaggccaaggaaaaggagtcgagatttagggagctcggtattggtgtttacctggactctgtcagacaagagtgagtctcaacacgatctatgcgacaccctcgaagattggctgaaccggatgatgcaggacctccattgcatcggctctacccaaaccaaacaaacgctttctgtcatcagtaatccgtcaggtcgatggtcataatacggccctgctgcgggagcaagcgttggccgcacaggatgccagccgagagctcctgcctcctcccggtcgagatggagagaggaacaggcgtgatgataggggctctatgtccagtagatcatcgaggcctgcgggagcggctcgactattcggaggtgctctgggcgcagctaggacctcgaaaagcaggcaatccgaggtcgagcgggagcgggaacatgatgaccgacagaattcaaggagccagcgagaagaacgcgggaatggtcggcgggaccgagagcacggaggtcgacacgataccgtgggtagggccgattctcgacgacatgctccagatcgacttgaccacgaggggcatgaagtagggaagtcagatcggttgagggatgaccgtgacaagggcaagagacgagagccgtctgagcgtcggtcacgctccccgcgagcacgaagagaatcttcaccactggcggctggaaaccccgtacatgccaagcaaaagaatgagcgcactgatcctcttgaaccaaatatcaacgatggtgttgcccggccaattcaatccaagatggatcgatatttcgacgaagcgtataatccgcaattggatttcactggggttttacccatatctgcagacggtctagtaccggacgtgggctgggataatatgctcgccgtattgaaggagaagggcaagaaggtacgtaaagcaatgtcaaggtttgcgctccagatggttctgacgatcgccccatagaaacgagccgcatcacctggtttctctccttccccaccgccgaccgcatcgcatcgacgtcagagatccgtgtcacccacgaggacggacaagagaagggagagcgaacgatccagcaggcacaagtcgaagggcaaggacaagaccaagaagaaaaaccgacatcgctcacagtcgcctttatctgagcaatccccgtacgactctgaggatagcgaggcgagagagcgtcggaggcgcaaacgacgaaaggaaaaggaaaggagaaaggcggaggaggaggaagaggacaagaagaagtttgggggttacgtttacgctcgaccgggctcgacccgcgattgggatgtaggcaaagtagacatgtcattctgagacgttcatgactgaacagctagcaataaaatgtactgttccaagacggcggcaagttggattaactctccaggtcgatcgcttgtccgatgtccctaccgatcagcctggtcgggtccgacaaagtaaacaactccggtcaccttgcacggaaccgatacgtcataatcgatcatgtcttcattcgatcgtcaatcaatctcgtttattcttatcttagcacttagagaagccctgcaagaagctcactataggtctatagatcgtacgagatttcgtgtcggtctggatcacatatcaaatgccggcatcgtcaagccggatcgtccggccaagaggaatcgacggcgatattacagagggaaatgctccagctgcattgcgaaacggaacagcaagaaatattcgctcgttgccatatgtacgtcagagacaaagattcgtgcatatattgaaaaaatatgagaaagctcatcattctctcctctgctcggaacagacgatattcgatagctcgctcacgtctgcggaatactctccatataacctcttgatcaataagccggctgatgtgtcttcccgttggtcagctggtagcactgcgcaggggcatccggaaggcaaagatatgggtcaaccaagggatggcgctttcatactcctcaaactcaaacagtgggctgtgctgtgtgagtcttcttggacatatcgtcatgacatgcttcgtgaggcttcttggtcactgctgacgataagttcttgttgaatcgcagcgagttgtacatttggaaaaggtgtcaaagcgcatccttgtaacgcacagtgggtcaagatttacgccggaccgtcgccacagaatctatacgaagtcggaggaggagctttgagaaatgactcgacggccgaaagaatggaactccggaatcgaggatccgtatggacagggaacatggactccgatgtacaagagattgatgacacacaagtaagatgtcagtgaataagatcacgttggaagacctgacgagtgtcgtgttactgcagacatttgcagtgcgctacgtgaagtgagccgagcaacatcagacgaattccaagcacaaataacttactgtcagaggttccaattgaccagaatttatcccggaccgtaagtcgataagcggatgcatgagactttattaccaatcaccatatctacttccgaatagagcctatgaaccgcggttcaacgtacgttcggatatcgctagcctgaacaccgttaatggttgacgcttaatctccgcagacaagcctgtggtacatcgaattgcatggggcggatgatgctcggcagaccgaactggttcgggaatcttgggatcgcgtgagattcgtatgagccggacctacaaagcgagaggctgaccggcttactattccgcaactttagtcacaagaactgctatgcagcagactcatgctgaaggagctccgtgccaaaaggcttgacgacgtctatcgcgctctcttggaatccttggcgaaaaagccaggctacccaagaaacatattggaacatccagctctgtctcagctgttcgaggatctggtcaaccaaggagactttgatgcaactgaacgccacatcgagaacattatcgacgaaggattgtgtcaaaggtccacagcggggctggacaacgtgtcgatcatgcccatccaattagcggatggaggtttgtctccacctagccgtcagcattttggtttagcaaatcaaggccaggagctctatttgttcggaggcagtgagtgatatcgaatcgagacggtcatggcttccaatgactactgacttcggatcgaaaaatcagttcggtacggacggaccttgagcgatttctggcgcgcggagatattgggcgatactgttcaatggcatcagattcagtgggataatccagaagacccatggcctcccgcagcaaaggacacgtatatggaggtcgcgggggatcatatgtaagatgtccgtcatcgctcgtaatttggatgcgctgattatccccatcagtgcgatggtctgtaatcccttcgcctatggatcgtacatgcctcgccgatcgatggtggagctgtatgactatccaacgatcccgtccgataccaggtgtatcgatcacagcctcatcggcgtcgacgtattggcggaactggccattccgaagcaacctctagaggagacaagtgccgatgaaaccttgtggagctactcctttaagaccagtaaatggactctggtcgaccggccagaatcgctttccgattcggtaggatcgagcctctcacctcggtggtatattttcgatatgaagtgtgggtttcacatgatgcgaacatagccctaccgatactgaaacatttgatggacagccacgagtgggggtcttcaggtcagtttccgtgaccaatcaagagagtaccaatgcagcatatgggattacgataagaaccattggcaggacccacagtgagggcaagcaggaattgtcttgttaattctgcgcctgatccggctagggttcgtttacagaatcggcggggacgttgatcctggtgggtcggtccttgtgcacaagtcgatactgctcggtattgatcccaaataccaatagaaaaaatctacgatcggcagctcgaagagactggaatgttgcaagtcaaataccctggattcataagtctcactcggcgaccaggcgtacaaacttgtcgagaccagatctcccgctccatcctgacctttaattgcgatgacgctggggctacaaacatcgacgtgtttgattgcgaacaacaagtgcttgagagaggcaaattccatctgcctgatccgtttccgccgcaaagcggtcccaatgagatcgcgcccaacaatatcggaaaggacaaactatggatccagagtagtcttgactacgtggaatgtaggcggatttgcttggaaaggtgcagaagcaacacgaaggatgaacccctttgcgtaccgttgatgatctcacttctcgcataaaacaggaacggcgcatttcgcactaaggtcttgaaagcggttcgtcagcagaggtaagctatgtaaaatcgtacggatcgcctggaatctgctaatgcaggaacaagccaggttcctggaaatgctaggtcaatccgatactatggaaacgttagagtacctaaaaggaccgttgcaagacgtctccgctggagacgccataggcatcaagcgtttgacagggcagatgatcagagggaaggtttttgacagtgaaccggcgagatggcgggcacgtctgcaggtgtttcaggaaattttgagcaacgtcgaacctcgatttacccaaccgagggatgacctggtacaattgcttccactatgatatgccatcgagtggcgattgttattacaaagactttggcttagctatactcttataagttcgtccaagtccgctccagctgagcagatcagagagctgccggcggctgtgcgtttgccccttgcccaaaacgcgaacgtatttgtcttggacgacaacccactcgtccgtcttgggattgccagcggggaggaaaccgcctttgttggattcgggaggcgcgcctcaagacgcatccttgctcctgcctgagccgcaagaatctgggtgtacttttcgaggagtacttgtggtatatacacctgtgattgcccatttgtcagccggcagagaagcggatgacgtcgacatagtggctcacagtaggttgtcctttgtgaatcgtggctcgaaccgagccgccgattccgaccgataaatacttgtcttcatggtcaagagaccccagtttcgccacgttaaccagcaaatcaccagccttgagacccgggacagtgaaagcgatcgttcggtcgatcggctgattacctccacggttcgttagaatcgacaaaaggggaaatcggtaaaggaccatgtcgtggtcggtagttacgagcgggaccgcctaatatcacatgatccgtcagaaatgaacttacaggaatcggctgcagccacttacaagggtcgtgctatagtcacgcacatagcgaagtctgttaaccaggaaaacctttcgtcagcttgtcaatctgaagttttggacggtgcggaacccacgcaagacttcgagcagcgttaagcctggcaatgaagctatacgacctcgagctagtgtcgaatctggatagccagagtggctctcgatttagagggtcctcacctgaaaccatcatatcagcaaaggttgcaaggaattggaagggctaaacccacccccagtaaaactttgttcagcaccgctgtaagtgataggtatgccgtccccaaggaagggataggccagggcgttcatacgcagcttcaagtagaggacatgtaagcgactctcggagtggggcgacatcgatgggcactcacagcgtcatcgcttgtctcatgagcaaagcgtgggactgtcacgagagatcgaaatgtcaacgaggggcgaaaggcggttggaataagttacacacggtcgtgattgctgttgttatgtggaagagctatcagttttgagctcgacgttgttctctggcctggcgggcagactcactccaaaaaggtcgtaagcgtcgtcgcatccaccgcttcatattgtatacgtaagatcatgtcggtcaattctagcatcgacgcctcagcacttccaaaggcacgcctaagatagctgctcagcgacagccgagcactctgcgagataccgtacatacctgagggggaaatagaggggataattgagcacggaactaagggcgctgccctgataggcgagagtatatacgggatctgcatcggtagatcagtccaacaaagctccgtatactatggcctagcaagcagctgacccacctccatgcagcacttctccggtgcaccaaacaccggcagctctctcgtagtcaggccagaaggatttacgaatatgcttgagcgtgtctaccctgaggccatcgacagaaaactcctggaccagccaatgtacgaatttctgcagctccaagatgactttgggattctcactgcgaagtatgcagatgtcgccttgtcagtagaccagcgttgatcagcagcaaaccctctctcacgtgttcaaatctggtaaagcgatatctcctttctcccctagccagcattgttcaacctcttgctgatcatcccaattccgacaccatatgagcttgtggaagtcgtcgtcctggttgaaaacgccccacgtgccgtcggacggcctgaacttgctgcgacggggtaccgccacatgattagcaatgacgtcgagcatgagatacattcctctttgatgcagctcggccgagaggtccttgagatcctgagtagacccaaaatgaggattcatctggtagaagtcggtcgtgtgatagccgtggtatcctcctggcaggttcgccgagacctgtaccatcaagccgatagacatcagtaacctcgatgtggcaccgtctgtcttttcgtaaattcactggactgatccagattgcagtgaatcccatgccctaccggaaagagacccatcgcgaaatcagcggcaagatcctcagtggttgaactgaaagctatgctttacctgaatgtaatccagcttgtcgactggaagcggatcgtcagctcgagaatggtcgaaatgataccggggcgtgcaataacttacttattcctttccatgttcctccgcaatactgtcgggacatcaagttgcaaggtgcttcgacgtcgtcttccctcgagaatcgatctgtgagcagttggtagattgactgctctcgccagccgcgagcgtccagagcgccgacagcctggatagtcaatgaagctgctgcggcagccgcccagaacttcatgatcgtgtgtcgcaatgagcactagatcgtatggcaagaagggtgatcatttggatgttataggagatgctgtagtatttatgttgattgactgaacgagttgtatggggatgttgaacactcgggaagaacttcgggggaatcactttcttggtagtcgaggcgctaattcgtcatcgtcgatcgatcgcgctcattgaccgtggtcgacagaagtgttccactctgccacatcattatagtcatacaactcctctttgctttgtactgtacaatgtaggtcattcacaacacacggccgatcgcagtccctgatcatcaaggcgattcccaacgaaccggtcgactgggaaggtcagcttctctgttcacgacgccgcgggggggaacacgaaatcgctaaagagatgcttgtatgggtcatccgctgcgccttgcggtatgcccaagatgcctggtagatcggcaggcttcggtggtggatacctttgaaagttctgcgagtcgcctggagtgcatagtaattcagtcagtcgtcgcccttgcgcagccaaagctttgcagcgtacctaatgacgcgacgtgtgggataattggtgcaccaatcgctctccgctcgagagtgctccagtccacaccggtaaaccagcgatggctcatgatatcacgagctcctccgcgcagattgccaaggcgtttagatcggtccgccgtcaacaggcgcctgatgagatcctttgcgtacgggtcgatatggctcgggaaggcgatcttgttggccaagatctacgaaccgaatccatgttcagtcatgcctgatcgacatggataagcccgcgttttctcaccttctcataaattcccatcggatgatcatcgaagaatggctggcagcggaaaggaattgtgtcagcgcgatgtctgtgtatttggtctatcaggggactacttactgggtagcctgccaacatctcgaatgccaagattcccaaagcccaccagtcaacggcttttccatggccctttgagaggacaatctccggtgcaagatactgtcgacggcatcctgatcagcaacgagcctacaacaacgggtatcgagcacacatcgaacttacctctggcgttccacacaaggtgaacgtccggtcttcgacaatctttgcgaacccaaagtctgctattcgaaggtatccgtcccggtccaacagcaagttttccggcttgaggtctcggtagatgatgtcccgttcgtgcaggtagtcgatagccaggatgatggaagcgatatagaatcgcgtcacatcggccgtaaatcgacctgcccgtcgaaggtggctgaacagttcacctcctggtacgtatgacagcagcatgtaaacattcaaatggtcttgatatgttccgtaactgacgtaaaacaaacgcgaagttcagtcgaccatgttggcaggtcattgccattgtcgtcgcgagttaactcacagctcgaccaagaacggatgtcggactcgctctaggatcgctcgttccgagttgatgtgctcgacttgcttgagccgcacgatctcgctcttcgccaagactttcatggcgtagtgtggcagttgggcatctgcatacgccgtctgttccggtgttggttcgccttgttccgacggagcatatttgagagccgggaagattgggtgataggagctagatcgataagggggacgaaggcggacgagtaggactctgccaaatgtaccggtacctagcaatcaacgtaggatccgccatgatgtcaggtgtaagtaccgacaagcctgacaggccgtactcaccaagcgtctcgatcacttcccaatcgcttaataacgctgggctctcggtagtcccatcgtccatctccgtctccaaggtcttcaactcttgctcatcctcgagcgacatcattccggatggtacgatgcttcctcctctggcaccactggcctcttgctcaaaatgacccgcccggtcgttcgagccggaagccgaccctcctgcctggctttgagcatggacgggtctatcatgcagtgatggatcgccccgggccggtacctctgagtatggcggagggtgtgattcggccaatgatgtctgtgaacccgaatcgtgatcgggcgatctcgacgctggtacggcggtgatctgtgttcgtaggaccgggactggagtcggagtctcgttctttggtcctagatgtttgagcttgtctagttgagcttgttcccggccaaacttctcatggggaagtagcatcgaagctggatcatagatgaacttcttggtagcggaactcggtcgagcttgaggctcagaagagttgttcatcatgacgacgatgttacaggaagatgtgcaagctgtcccctcaaaataattgatgaccaaggtttgaaagttgagcggattgattgatctgatggggcgaagtcacgagagtttgatggttgttgaagtagtctctatcccggtgtttgtagagttgcctgatcgggcgtagaaagcggggtttcaaggtttagggtcgccgtgaaccctggtctatgacgatagccgtttagagtatgctgtagttgtgtctgctatgcgtgaatctgttgaggctggcagctgatcaggcaaggttgaagcagctggacgattgccgtttgatcgattgttggtcaagatatggtcgtgacgagttgcacaggtaatcaaccggattcgctctgctcgatagatcccgcacaagcaagcttgggtttctaccaatctccgcgtttgtcgaatccaagctcacgggcgaccttcgttagcttactttttggtccagctagcttctacgaccaaagtgatttgatacatcgagcctaacagaatggcactcgtcgtcgaaagtcgtctttctgataccgaagtgtaccgtcgtaccgtcgcgacccactgctcgctgcgcggaactccgacagacatttgcacgcgaacttctcgtgtctagcatgtttggagggaaaggcgcaacagcattaaacacagcagatcatttaaccctctttgctgacgaaggcccttttggctttctccccctcctccctactgcatcgcctgtctcccatcggctacatggtcggagcatgtcatgatgactcttcctacatgggctgatgaaaaacagccgaaagcggaaggagatgcgaagaagccggcggggctgaacctggggaaattcaagtggaacaggctgcagtgcccatccgagtgggcgactggctcgcgcgagacgcctttccttgtgcgtctgccctggtattggcgcaagccatcccgtgccctgtcctcacggcttgacagatgatcacgaaaacaaagtggaacccttgccctgaacgaaacaacaaaatagtgtcgatcgagagacatttctctgccacagtccgtccgtctcgggatccgggacatctggtgagttggccggtcataggcagcataaattccgtgtctccattcttgcattctttctcgtatacaggtggtaaattagaggccattcgaacagagcgtttgctcctccttgcccttttgcagtcccatatcaagtcgtcgtatctatgtgccgcggtttgcagacaggctcattgcctaagcttgaggacgattcaggatgctgatgatcttgagcatcatctggcctgcacttcggctggcggaagaattgtcccgcgatcgcgtgaagtggtccatggcagccctaaacgtatcctcgagcgtctgcctgacggcaggcaagtagctttggattgtttcatcctggacagcattgaagggacatcacagaaaatcagtctcgctgaacgcaacgacaacatctcgagaggaatcttgcttaccctggggttgatgagcagagaagcgcggtagatccacgtcatgaccgcttgatattccctgctctcggtcgactgggcatcgagacactttgacagctggatggatgatcgcatacgcggtcagaaatcagcacgaaaacttgtgctggtaatcgttcaagcctgttgtgcttaccctgtgaaccatggtcaagagcacggcttgcgataagggcgagggtcgttccctgggatcaggcaggtattcggcagtcctgggcatcctgcttgttacaaattgcaccagatccccttcggacaggcttgagaacgctttcaagaaaacgtcctccgcatcttcgggcccagatatcagttgctgcagcgctccgacattaggagccagtaccggttgggggctgatgatctggctttgctgtggcggctgctggatttgagggggagggggaggaggcaagttcatcgggacgctgttgttggatgctgcgccattgtacatcccctgcggtaccatgtgaggcatctggccagtaggtggaccgggcggtccctgcagcattacagcgggtgccatagcgccactctgagaggctcgcaaagcctcaatctcgcgagtaagcgattgtacttgttccgagagggcagcaagcgatttcgacatagtcaacatcgctgcatcgctcgccgtcgcttgactggattgttcgatcatcacatcttttcggacgctgcaggtcaggtaaagtgggttagcaatacgaacagacctcgagttcgcagtcaacagtgcttactctagcatttcttggtggatggcgcgggagacttccagagggacatgttccacagctgctacaaactgtggcagaagcttttcatcgatgaggcttcgaacgctcttgtccacctgtgcaggaatacacttggatcagacagtttgcaagacgattaagaacgaggtagacataccgctggtgagagtatcgacgtaaaggttcggcccaagtggggcaccaaggccttctcaacttggctcataacagtctgtgatgggatgatcaggtccggtcccaaagcagcggatccgactgtgcttactgtttcgaccgagaacaggataacattggcaagcttatcgccgacatgcttttcaacttcttccctgaggatttcctgcaattgaggcaggatgctgaaacggactagtcaggctcgaggacacgtcaattgcaaccagaatgaccaacctggaagccatttcttccttgacgatgcgcggtagtaacccgttcaagtccccttggaccgcttcgagcacgctctggcggaacgtgctattgatggcgactgtctgttgttcaaaggccgctttgatgtcggttcggatatcgtctacggctcgttgagaagatcagactcgggaaaaagacggtatagaacatcgcacataggcttactctgctgaccgagaacctgacgaagctcagcatccacagacttggagatagccgaggtgaacaagttttcaatctgcgatagcttttaatataagagggcgacctctttcacggcttgcgtacgttctcaccttcgtatagtcgatatcaggggacgcttgcagcctcgtgctcgcctggaccgggctggtacccgctttgggcaggttgaccgtcacatcttttccaagagcagcgtccttcattacgggcgaggcgggagtggtttcaatctcttcctgcgttggctgagatcgttcctccctttgttcgatgggctgctcctcatgagcggcagtgtctagcacgatgtctgattctggcaatggcagcggcgcctcgatctcatcgagcttcttcatcaccgaggggtgaagggtgagcattgagaagcctttcagatgacggtaaacaaccgaagcgtcctgattcacatcgctgaggtctgtagccaggtcgctgaccgaccctatggcgatttcagcataggcagagaaaacctgcttgccggtaccggagactttgaccgcgagcaaggaggcccttgcccaaacggcgatccagaggatgccgtgtttcgcgtcgaagacagccgtagacgaaggcacagtggatgcatcctgggtgccggacggatctcgtaaaacgaggctgctcgaagcgctcatctcgccgttctgctcgagagggaagatagcgtactcgtctcgcgtcgatcccagtaccagagacgatcccgtatcgacaatcgatcgccacgagccgccctgagccggggcccgaacgttcaactctcgatattgtttatcgaggatggatccaataaggagactgttgtcctggaacagctggacgcattcggctctttgtaaagagacggcgacatccacaaggttctatattgaacggatgcagaaaatcagctgagagctgatgcggaaaacggtgacaggctaagacacttaccgtttccttcacttgagttccgatgagttgcccaagattcgcccagtctcggcttccctcgtcgaaagcttggctcattgtcgaaggcgagagcatatatgctgctgtctcggtggtcacgatcaaacggttgatctcgtcagagtcccttgcctctatccatctgatcgatctgacgatcggtcccttctgcgcatggttcgggccggtcatccacctgctgacggcagagaggctttcgctccctgcctgtgaatcgagccaccagagtccgagcgttccgtcctcacctaaggctgcaagatagctttcagacacagcaatctcaaccaccttgggtgcggaaccgcttccgttgtcaaggatagcagcagcgttggctccactcgtgtagtcgatgactcgggtcttgcctttagccagagcgtacgagatgaaagtcttgctcgtcgagattttatgacccggctgcatcccggcggtcaggacggtagtcttgacagtagcaatttcctcctgatactgcttgtcgacagctccaacgaggttatttgtcgtggaagacaaatcaaaggtgtaatgcaactggtcgatcggaacaacctcagggcgagtacctggctcagctgttaccgcataaaggaaaggaggcacatctgcattcttggaggctggagtatcttgtactacctgtgcaggtggagcaggagaggcggatggagtagcctgggtagcgggcaaggcgggaggaggtaccgcattcgacttgccaaccttgggagatgctgcgacctgtttgggcagctgtttgggcaccttgggagtggtgtgcttgaatgagatggggcttttgtgagaaggggtcgacgtggcttcctttttgacggcaggctgggtaggcgcgggcaagtcgaaaacgtcaaagggcgagataaaggtgaacttggaagcagtaggcgctgtctctttgctgccagtgccctcgatctggggagaggcgagaccgacgtcctccatggcgaaatcctgagtcgactgctcagactcgcccgcttgcgacggggaccgagccttctgagccttctcctgagtggagcgattggactgatttgtcgagacccgtccgagctggaccgaagcaggctgagcgtcgttgacgacaggaggagcaggggagacaggcaagggaatctcgctggcggcgggtactcgcatcatagtatggtcaacgacgggctgttttaagccaaaggggagaccggacgagggagaaggtacattcgatcccggatttgagctgaagagacgcaagcgatcaaggtcagcttttcgagagacgtgaacgcgattgaacgtggcttacccagacattagtgtggccaagagactctgagcgtttccagcacttggagatacgactcgatgatgattcggtccgactggacctccgagatgagatgattggggcggaatattgggtagcattccggcgttcctgaaaagctcggcggcgtgtccaccatctgacatcggtggcgacatcaaatgaggaggagcatcccgtggactgggaagcgggggagattgaagttgcgagagcaaggactgtagagttgcagggggagaagacacctgagccgaatgctgagctggcgaaggcgagctttgagttgcggctgccggtgggccgttcaacatcccaagcagtctttgggcatccatcgtgacaaaagtgcggggctggctcgttactaaagacgatcgagttgtgttatattgaccctgatcgctgtccccccaaaaaagtatcgatccaggttcgatggtttatgcgtagcaagggtcgaccgatgtgtacaatcgagagcttctcggacaagtgaagtggcatcgcgaccatcgagagagactcacggctcgctcgcttgatgacgagttcgtgtgagagacttgatcacgtgaaagcaaacatgtcgaactccgatcgcacccaaacactccaaggacgttgacccttgatcaggtcggccttggtttgaatcggctcctgagcgaatacgtaacaggggatgtatagatggaatgaccgagacattgcttcaggaccagctgaatacaaccacacatcattcccatcgcagagctttcggcatcaagttccacgcgacatctcgggcgtatggtatgtaagacagacaataccttcagtttcgaacccagaccatcagtgactgcacgattcgtaaacagatcccggtgaactgaccatagataagctaggtattcgacgatgaccatgatcaaacagatcaaggcgctcttgatcacaaaggccgagatgaatgtgaacccaatcgtgatgaccaggactaccgtagctaccacccgaacgggcttgaacatctgcaaagtcgagcgaattgatcagctcagatctttggttcccattcgtctccactcaaatttacgcttgtcacctgcttcatgggtccactatgtcacgcaacagccgcatcagtgccaaatacctcgtaccgtctggtcggctctgtctcacatgaggaaaccggtaccgatgatgttgatgatgataccgatcgtgaatagaatagcgaataccacatagaatccgatgaacaagtggacggctcccaagatgctaaagatcaagccggcaacgaagcctttctccatgtaaatcgatcgtgatcagcttcccacgcccggtcccgcccatgactgaagtgaacttacacccagcgaaaccatacagcctcatcttgtaacccaacttgattccacatatgtcctcgaacgctgctttttgctaagtcaaggatgcagtccacggcaatgccccttgtcagctgatgagcgattaacgcaggtggtgacctgagacataccccgccaaagaccgtgtctccaggagcttcaatatctgtatattatattgcatcggtcagcagccgtgtgcttaatctgtctcaccaccgctgagcaaagactgactgagccagcctcgaggcatctttgatgatttcgagcgaacttgtttgtttgtcttgattcgtaccgtccaatcgtcctccgtcctaaactgcgaagaaacacggagaatagtgtctattgccacctggcagtttgaccgtttgtgtcagaacaagcagacgtacagggtcccaaatgtactcgggatgaaagtcaagtcggtaggaagagccaagagagcaaccgacaacatcacagccatggcagattggacacggtagccgctgcgggcaccaaggcgacgcgaaattccaaaacccgcagggccgatgaccgaggttgtagcgcgctgtgcccgtgcttagtctcctagagtcttcagagctgtaggctgtatgcacaaatgctaaagctacagtggcatggcatagacaagatggcaatcgatgtccgagcaatacaggatcgagccagctttgattggaaaccacagacacaggcaccgctcttccttggatcatagccgaacaagtttgcgaatcgaaatcgatcttggacgagttgcgtcaggtatttcatgccattatttggtagattatatggagaaaataaatgtacaatgggagtcaccctcacccggtagccgagcgatggcatccaggttttggtacgatgtatctcaatctggtcccgggaccagccctagctccaatcggattgccgctaaagacccaagccagacctggtggcggcgagaagggacccctcggcctggcccatgtcaccggtaatctcccacatagacgcacccctcagtccagcttgtcgactgaactgagccttcaaagagatcgagtcgggatcgtcgtaggagatgatctgtccgctcgcccatgatttcaaccaaggcgtgctggaacagtcgtcccattcccgcgtgaaacccccggcgccgacccatttgccggtctgatcgtctcgcttgagagcgccttgcgcgattagagtggcgaaattgacttgcccgccctcatcgtctccattagggttgcgaacggtcacgtcgggctcgagccctcgtcgcctggtccgaagcctggatgcattcgacttgtacaggtagccatacgcggcgatgccgagcatgatctgatcggcgggcatccccgccttggtccaactgttaacggcgctgtaggcgttggcgaggggcatggcatcagacttgcagccgttggagaggggggcattgactcccggctctcccaccgagaatacatcgtagttcatgatcgtaatgtggtcgaggtactgagcgtattcagagacgtcttgaagagggtttccatccgggccagcgaatggccagacttgtgtcgccgctgagatgatggcttgaggaggcaaggtgcggcgaagtaatttgaggaattccaagaatttttcagagtcatccgccgaccagaggttcccatccgctccgcgagctccccagtactcattgtcgatgttgataccgtccaggttgtacgagttgtacactttggcgatgttgtccgcaaatgtctgtctcgccccctcggtgctgacggcgggcgagaaatacgtgcttccggtccatccgccaatactcaagctgactttcttacccgcggcttgacccgccgtgaccagctgtttgagagtgtcaagactgttgtcttgggtgaacaccaggtcgaagtctgaattggggatggcgaaagcgaattcgaccaggtcgagcttgctccagtcgatctgactgacgggatacgtccagacggaccaatcagggtaataccccgacgtcattgttctcggcaatatcgcggtgctgagggttgatcctcttgtaggtactggcacagcagtgctggtagttgccgtctcgctagcactggaaacagatgcttccgttgtagtagtagatgccgtgctgaccagagattcgagactggcagtctccgatgcggacacggcctcactagtagtcaagatatctgtagcagcagatgttgtcgttgtagaaatggcagtatcgacagacgatgactgcgaccaccagctcgaccaccaggacgtcgtcgagcttgaagcacttgcaacagctgagctgaactgagtgggctttgattgcgtttccgagctgtccaatccagtcgaggtgaccgtggcggtcatgctctcggtattggacttggtgctggcggtggtcgcggaggaggggtagagcggaacagaggcaggagcctccgagtctggcagatatgtcatgatcgcttcggttgcagtactagcagcggtagagacggcactgtcgagcgggccggactgagacacagcctcggataccacgccagtctgtgatgtttgcgaggtcgtgatgctcgctgaaggtgggtagtccggtacgtctccgggtgcggtccagttcggggtgtacgatggggcagctgtacttgtcagagactcggaagaactggcagtctccactagcgaggataccagggaggtgagagaggcggtaggtccagaagcgtgcgctgcgcttgcattagagggggatccagtagcgaaagactccaacacactgcttgattcatctagaccgggagaagcgaccatagtctcggacgcgggaccagtgactgtatcagtttgcgcggacgtggtgctgctgacggcgatggtcgactctgaggttataggttccgaagaaagcgaaccggatatggtttgagaaaggctctgggtggaatccgaggccgatgacatcgagttccagctcgacacggtctcggacgcgatcgccccggccgaggtttccggtgccgtcacagacggcacagagtaaagggaactttcaccagtaccagtactggtagcttttgaggacgcggagatggtagaaaatgtccccgctagtgtcaacgtgtcggttggttcctcctggtccgatgatgaaaccgaagcggtcgctgagagagactcgcttgagagctgggtcgcgatcgtctcccaaccagaggcggtctcgaatgaactgatccatagcgtctcggttgcggttgcgtcccctgaaacggtcgaagtgaagttctcgttatttgtggggatgatggcagagggataaggtgtgaccgctccagggatccaaactgtgttcgtccgagtcgccatgacggtgattgtggtcgtcgcagtgatgggcagctttctttcctcgatcaagcgtgcatgctctctggaacggccccaagctaaggatccccatgatctcgcttcgacaggtgagaggaccgaagacaccagtaagaggcagagcggtatagacgagagcatgatactcgaacttggtattgaaagaatgtgttgctatagttgtggataaggcgtcaagccgaccgaagagtatttgtgagacggctagcgtctgaggagtaacgatcgccagtggagtgatagaataccaacaccagctgccagagctgaaacgaggcgttttcctgagatcctagtcaatagggaggaacaacagccttaggcgacactactattatgattcgaacaggagacaagagcttgaggagatctttctggacaggtcgggcggcatgagagtggaatcgatgatttgaactatttgagctgcgatcagccatccagaccgggaaggcgcaacgggttccgatctcgaccaagtgacccgccatctcatttcaggcgccaagatctgcaggttgatcgatattccactcggccactcgaggtatttgacccggaagaagaaatacttccggaagaggatccggtctcaaattatcacggacatgaacgaaatcataagtccgcaggtcagctgagacggcgatctcgttgcagcatccggatgatacgtcggggtgggactttcgacagaggtcggccaagatatttcgcaatccatgggtcagaatgcagtgtattgtcaggtccgaaaccagtatccactcccagtcaaattgtttgtgtcggcgtggctttcctgcaaacatgtcccataccacgccgtcgcaaggcaacatcaaccattccatgcgagagaattataacgaatttggggtagacgaagtaggccctggaggtcatacgctcgaagtcccggtatattctaatctcagaatgtttcactggcgttctagtattaccgcaaagtcaacgcttcgtatcggaatcccttctttccaggcatccgcaaggtaagcgtacaaagcaaagctcctcactcggtcgagctagctagctaagcactaccatgcatcacatgtgaagattaggtaatatttgccctgctcgaccgatggtggcgggaagaaggtaccctgcgtattacgagattagatcctgggctagagccggagttgcggatcttggacatggcagcaggaaggtgagagaggtgcagtgttgcgtgcggcttgaaatctgacctatcgccttgaccgtcatgacagtggagaagctaccttggtcatcgaagaatggtacgagagccgcttctccggtccatccagcccttcgacaagcaagccaaatgaatccacggcgaacccgctggtgtcgaatgctggcctgccaaaccctctggctagcttgggaatcggtcaatcacggcagcctgtcgcagctcggccggcttttgtgccaccaaatcgcaaggttaaacaggcagaggcgacattgaatccagtatcgggaagagccgatgaattggaatcacctcgattaggctcgaaggcggacaagaagccgaagctagtaatcatggccacggatccagtacgctcgcagccagcatatgggaagacattcatgagcctgatctgatcatgtcatcgctcgatctgtgcatgacagttcaccgtgccagcgtatgaaaatcgcacaggcaaatcatgcctaccgctatcattccaggacatcgcgcagggcaagctaacaaccgcgataccggttggcaaaccgttcgacctggtcctctgctcgttcgctctgcacctggtgggagacccttccgagatgttctcgttgttgtacgagctcagtcagatagcgaggtggttggcagtagtcgcgccgcacaagaaaccagaggtgggcctgatgctcaagcgtgtgaacgtagagtcggtcatactgacaccgtgttgttggttcatagatcaaggagggctggggttatgctcgatggaacctcggaacctggaagactacgctcgacgcaggtgttcacgccgaggatactgacgaggatgatggtagatcggttgctgcacagagcaaagatgggctcgtcaatcagggtcaggaattggtactcgatagggtgcgatgtagactgtacaaaagtctcgagctatgacttgaacagacagtcacgtagttgcgctactcccattcagggatgcctggcgttgctgtcactgatcaaacggttctcgctgtgccccgggagtccatcgaaatcgcgcctttgcgaggctcaatgactcgaaaggggaacatagtaactgtcaatacgttcgaactgactagagatgaaccggtcagtcgctcatcaacgtatgtttcttgaccactacgtcgactatgatatcggcctgcttctttgtaatatgatagtaatggacgtgatgggaagacgccaaacgcgaccccagcatgctcgcttagtgcagctcccccccgcggctttggctcgtcgcgccgtactctggcccggggtccagcgactttggcctcatgtgccttctttgtctgtgccgtcgtgccatgcatacatgtttaattacaccttgatggatgtacctctggataaacgacgcttgcctttcactttgagagtgacaaggcagatccactgtatttgacgacgtccccatcatttattgatctttggtccgaacgacatcaaaagtcggccatcagcgggtcagatcaacaaatacattctctcacgttcccacacttcctcgacgggacgtgctcgagtgtgaaacatctatcggatccctttgatcagatttaaatacacaaccctcgtatcatcgacttccaacttctacgaacagacggtccggcaggtacggaatcttcatcatcgcaagattcaatttattggaaacgatcacgttagctggttgcaacgatcacccacgaacacccctctcgacgtcattgtgatcaccatcgatcatcgaagcaccacgctgcgcaatgtcctaccacgatctgggcaacatgacgccttcaagaagagctcctccggtcccagggtcgagttctaatagcagttcttcctcgttgcaatatcagcagcaggggaaaccacccatgttgtcgtccacttcatacgcaccgtcgttccatcacaacgggatggccaacaacaattcggtgaccccgctcagtctaggtcgacatggaggcccagccgccagcacattgtcgagctctggctacggtaatagcatgtcgcccggtcagactagttcgctgtacaacgtaggctcgcgggacagcgtcggcggaatgactccgataagacagggcatggtcacggtcaacgaggaaaagggcatcaggagtttcttatggagtaagaagtggatggttctgaaagagcaaaccttgtcgttccacaagaacgaggtgagcattccagctctcattcgtttctctcgtcttgatagcttgttgatataccttgtcgaccggtacagaccacaccaacacctacgagcatgttgcagctgaaagacatcaccgatatccaaagagtggatatcaagcccttttgcctcgagattcaagccaacaacaaggtgagagatatacagcctggagttcgccccgtgactccccgctaacgtaggagtttcgtcgaatatctcgcagcgtctgtggatcggtctcaagtctgaccccgagctctacgaatggcaggacgatatctatgccaagtgtccattattgggcgtaagcggaccgaccaactttgtgcatcagggtgagcttgatgatgcttcgataggtgctgttctttgcagaccgtctgatcatcctcttttgcagtgcacgttggctttgatgctgttagcggagcatttaccgtaagtgttcactgcagtctaccaatcatggtgtcagggttctcaacttcgctctctgaaccgatcagggtcttcctgagcaatggacgcgacttttgacctcttcggccattaccaaggaggaccaggtccgaaaccctcaagccgtcttggacgtgctcgaattctatacggatattcagaagcagcaacttgatgactttggcgttccggtcatgtctagcagtccttcgcgtactggtagtcctggccaaacagcaagggcgcctcaagcacccgtgcagactgccaggttcaacgctggaactgggttggcaggacaatactccgggggacaagataagcctcaagccgtgcaacgctcggacagtgctccacctggaccagggcttggcgcgagccgacagcccagctacggccagcaacagacgtaccaacagcagatcccccatccgtatgctcagcaagagagccggccgagtccatccagacaggcttcatctagcaatcaccagttgagggaggattcgaaccagcgagcggcacccgcaccccctgcagccccgcgtccgcttgtagcagagcgtcgagcgcccgcaccgcctaaagcgcagcagcagcaggagcgtacgccgactcgacctcgtcagcctaccgcagagtcgactcgctataaccaacagcaatcgtcggaatcgccgaggcccgcattgcagattgccaagaccgcaccgatcgttccagacgctggcaatgtgggagtacagtctgaccaaaagcagaacggtcaggtgcccaaccaaattcgaccgttgcagcccgcaaaaaagttgcaacaaggaccgcctcccgcgccctcctcgggagcagcaacccgtggagatgacaagccagtggcaaaggcgagcgaaaaacgcatcagcacgatgagcgagcctcagatcatggagaagctgaggtcggtagtgagcccgaaagacccatcaactatctatgccaagatcaagaaagtcggacaagggtgagtagcgctgcgagggatctcggttgaacctgtattcacacccagaattgtgctgttacagggcgtccggttcggtatacgtagccaaaacgttggccactggcgaacgtgttgctatcaaacagatggatctcgcacagcagccccggaaggagctaatcgtgaacgaaattatcgtcatgggcgagtctaggcacccgaacatcgtcaattacctggaatcgtttttgatccgaagcagtgatctctgggttgtgatggaatacatggaaggaggagccttgacagatgtgatcgaagccaacaagatggaggaggagcaaatcgcggcaatctgtctcgaggtgagtgtccgctccatatctgagattggaaacaacaaaatcagagcgctgagacgaagttcgaaagacctgtcgaggcttgcgacacctgcacgatcgatctatcatccatcgagatatcaagagcgacaatgtcttgctgaacaccaatggagcggtcaagatcagtaagtctttcgagctgtcgggacaagtttggaaggcacgctgagcgctgacgaatgttcaacagccgatttcggtttctgcgcgaaacttacggaccaaaagtccaagcgagctactatggtcggaacgccttactggatggcaccagaggtcgtcaagcagaaggagtacggagcaaaagtggacgtttggtcactgggtatcatggcgattgaaatgatcgagaacgaacccccctacctcgatgaagaacctctcaaggctctttatctgatcgccacaaacggcaccccgactctcaagaagcctgaaagattgagcgcagaactcaagcatttcctttccgtgtgtttgtgtgtcgacgtcaagagccgagcatcgactacagaactgttgacggtaagtcgggacgagcagttcaaccgcctggccatcgttttactgaaccccctttgacatcgacagcatgagttcttgaacaaggcttgtggtccggagggcctggtgccgctcatgaagaagaaagataaggcgagtcctcgatgcgagcgaatgtcgacgtctcatcgctgatttcagaactgctacaggcataggtcagctgagcttcgattttgacctaatctgagaggtcgcgcaccttacgacataggaatgacctcacgagctgtatcgatagtgtctgacccgatttatatgcttttccaactatcttgttgtttcaaggtcctgccgagcaaaatattgatagagcgacctcgatattagcatgcatagcatgcatatgtgacaccgcccagggttatcttgagcatcgaaaacgatcagccgctgtaaacaagccgctcgatctcgcactcactcaaaaagtaaacagattggcgttgaatccaaatgacgacagatcgacagatgaaatagtgcgagactccctattgcgattctgttaacagctggattctgccgcctcttgatgagggtgtcactacttggcggtataccgcacggcaacgaagaatacagcctcgcactacaaattatcgcagctcttgagatgccgctatggtatccggacctcgcgaaatttatgctgagcttgtcgaggcagccttgaacaagctggtcgacgattgccgtgagctagagacccttggggccactcttactctctactgaaaacgccagcttttctatacttacagccacggatgacgatctctcgactctcagcttcgtcttcggttcgatgctgatgccagctctgaccctggtcgaccgcggagatggtgggtctggccacggaacccttgacccagcgacagcatcgactgatgttgatgcaagctcagtgaacaaatactgtctacctggcggacgccatctatatagggtacgacgatctctataacattttgtccgagactcattgtggttcagtaacaggttactggcacaaagggcaaatcatacacggttcatcctgccgacgtccgcttgaacgacgcatactgcccttgtgcagcctttacatattcgtgtattgttgtggggaataacctgatggtcagtatcgccttgagacaatctgacttcctggccttcaagctcacttgggagctctacgcggtgcgagtcgtagtgtaaacatgtcttggctgtaaggatagcggagaagacaggacgatgtcaatcaatcacggttggaagggaagccgccgcagagctcttgctcgcatcgaaagccggaacatagggcggacgatcaatttggtcgcgtaaagcatggagtaaatagctactgaaggtcttttccttgttgatattacgttatacaattgtacatgagtcggcttacatggcggtactggctacatattcgctacagttgctaatgattcttcggcgtccatcagggggatcggtcgatcgattgtactcctagtctcaatttggctggagatatcgcttgtttaacatccactgtgcgagataggcagactttagcgctagacgggacaagtcgctaaatcaatgaagaagcttacaatatcccggcataaagccggccaagtccatcgtgatttcagcttcatacgctgtgccgcattccggttcaggtcgctttccagatgcaaggcctcacgcaagaagagtaacgacggctggatcagaactgtgtgcgaggttcagggtatgagttttcgcgagatgaaacttgagttcggctgtccagtcataccattcaagcgtcttgcccgtgtcatcagataggcgtccatcaggctcatgcctgtgtacatcatcagataagcaatgacgatggtagcactgcgtgatacgccaacgcgctagtagagtctggccatcagcaagccgtgcatcaacgtggggtttcgggctagcactcacgcagtgaaccagggtcttgccaccgcctttcctcgcttcctccatgaacgcacatgcagcggtgaattttggctacggaggatcgaaatttaagcgttcttctcctgaacttgtctcgcgcgggtctgcattacctgaagattatcttggccgtcatccttgacgttctgaatgtccatactgtaagattggaatttagcagtcgcgcaaaggtggttctaagccatctgttctcacattctgatggcctggtcttccttgtcgagcttccggcgggactcgcagttgccgctgaggtcgttcgagtcgacgtaatgaccatgaatgaaacaagcttcagccgccaatgtctctccgacagagacaacgtgcgtgatgccaagtgctttgagcatcccgctgttgacggcatggccactttaaacaatagttggagggtaagtgacaattatgggaggggccagtctaaaacagtctgccttacagatttccaagatatagatgatctgcgatcctagatggcaaggatccgtcgaatcgcggatgagtcatccaggactcgactaaagcattcgagctgtccgactttttccttggccttctgctagaggaagtcgttctgttctcttccttgacttcattcgagctgggactccgagggaaggagatcccgaacgggttccatttggcgataggcgaggtcggtctgatagcagcacgtttggatttccccagaacttcggtaatgcgatgctcgactgtttggagaaactggaggtcgaatggatacacaaagaaggaacggcgaagttccagatgcaaagtcaagtaggcgtctataaggctgatgttccgggtaaacatggtataagccaatgcaaagaggctggtctcggtctgtgaattcaaacggagtgagcacgatcaggcgcaacgactcggtcatttgcgtagccttacataaccgtcttcgcagaagagcaggaccgtcatgttgtcgttggtaccccttcgtttctgcttgacgatcttgctaacacattctaccaacatgacgagcctttctgcgaggttgccttccgagtgaccatggcatccgctactacggctggaggagccgacttcgagatagacgggacccgtttcgcgaacttccgatgcgtcacttcgatttttgctatagtgagggcgtgatttggccctgttagcgatggtggcatacactgcttcaatcgtgttttcgcctggcatatcagcgaggtcgtgcgcctgtgataatggattcggggatcattcagcgactgatccttggtgacttcggtagaggtataccatactcacttcgatggcaaggtcgacctcgagccaaggtgatactcgatctggccggaacggatcatcacgtccgtttccaagctgtaagacctccaggtcaacttttcgagttcgataaggcgatgcacttcgaacgactactcacccagactccatcggcgatcatggacgcgccagccaacttggtcgattcgaccgcctctcgcatgtgcaagtcacgttccggcctaactaggccttccttggtagcttcgacgagctgaggcatctgcctctcaatctcggcaaacgtctcggtcactatgtagacccgatatctgattggcatcgaggctcggtgcgcctcctgccactgatccctcaatttggcctggaccaagacgtcggaataagtcgtcggttcgacgccctcttgcgggtcgacctcgataatcatgtcatctccctgcttgtcggcgggaaagtcgtctctgggatccgagtcaggcgggaccttctcttcatctcccgtcatcatttctgtatggaagaggtctagccgctcgcgataagtcgcctcttgcgcctggacaaacctggtttgggagaatttcagcaggattataaatcgtagcactcagtcgtcggttcactcacttgttcgcaatttcaagcaagggtacatttccatttgcgtccttgcggagaccctgaggcgcataaataacgaggtcggagatggtcgcatacttaatttcttgaatcatcaaattcctcaacgagatctgtcctccaaggtcaggaggtaggaaccgacctgtaccttcttccgaatggagatctagcaatgtctcggcccgaagcgcgtttaccaacatgcagctcttttgctcgagctcgggatgttggcgggcctcagcgtcgccattcattccaggggtcggcaatccactccccggctgatcctgttgggggagatcaacctcgacgtccgagtcatcgtcctcgggtatggtcaagttgcccatatcaggcgtcctcatgaccgggttcggcggattcgtagcgaggactggtgctggtgagcctgtcctcgagttgcctcttcctgagatagttctgagcatggaaacttgatcggccggatgggccgatacgggcgtttccggggtcgagatcgatcgactgatctctggagtcgatttcgaacggtccgagtcactcgtctctagtttcggccttgccggttccgacggtcgacgatacggaagatcacgcgagtggaacgatgtcattgacgtcgaggcatcgacaccatgatcgtgctcctggacgacatccatctcttgggtgacctgtagagcgccttcactcgtccgctttcccgatcgagtcgacggtgccttgacgcaagtaggatgcatgccctcgggaacggcttcttcatccctggtagaatcaaagctagccgccaaaacgtccgtcgcagcgtgatccgctcctcccgcgacttcttccatcttccatccggtcacccccgacgagccatcctccgggcatgaagccaggcttcccgtcctggtcggcggagaataagctcccgactcgtacgactggttgaaagtcgacgacgcctcccaatcggacggtgccgtcgagtagtatgtcgaaggcgatgatatctgggaagacatggtgtccctcctcgcggtgttcatcggggaaggatctgtctgacgggcgcaccctaccgagatggaacccacgctcgatcgattatcgcgatcttcgacgagctgttcgacgggcgcgcccgagtgtaccaacgggccgggtggcttgtcgactaatgggtgagcctctccttcttcttccgctaatccagagatatacggcgctctgaccacgcagagtcctctatacctgggtggatccagaggcgggttcctaaagagccagatgatttcgtcagcactcgacttccacttcaccttcactttttcgatacaaagcgtacccaaaaaagttttcaagaggtccataagcaccgtctgggccgtccccgatcccgtgcagccaagggaacaggacgttggtaggaaccgaggtatcatggtaatgttccatcaaccgcttgacctgtcgcacgagccggtgagaggcgtatctcgataagaaacggggcatagatcaggccggaacctcgacgtagactcacctgtgtcaacgatacggtcttgaccccgagccccacttcgggtcctaccgaatcgtaaaagtccggcatcccccagacctgatcctgcgagtgttgttcggaactcatcttgacactcgtgaatggcgagccggatgaactcgatgtcgcggatttgccagtacgcagggagtcgtcccaagtgtggctattgtgtctagtattgatatcgttatcggcacgagaacgtgaaaggaggtcgctcaaagacgtgcgcttctcgtctgcaagcgacttgtcctccttctggcgattcggttccgaagacgaatccaaagagcgctgtgtcctgggtctgaacgatcttctgtggtcttcctgatgaacggctgaagtactggatctcggtcggtcgtcctcggggaggatggaggaagaggacgtggatatgctcagggaggaacgacgacggggtttggcgattctgaaagacatccgaaagaaggtgtccttctcgatatcttcggtgtcaatcgaagcgaagagccaacgctggtccaatgttgggacgggttgggaagattcgggtggtgacggacggtatgccaagggaaaggaaggggagaaaggtggtcgggacaggtcgatagagaagagaagagaaagcgagacagcggcgggacccgaatacgccgtctcgaccgtccagaacctctttgttcgacgttgatcacgagactaacgggtgaaactctgggccggactgtagctggttgttattaatttgatggcccgacgacagatgagtgcgggtatgaccgggagacaaggttatgggaccgagatagtgaggtcgtgagtaggggggttgcgagtgtcctccttgtcgaacttgaccccacggggaggtggcttggcgtaatcacaaatgatgatgattacacggtctcgtccgtcaggctgcgagctacgagcgatcgttatggcaagggcgaactgatggatgaaaggtttgattgagacggtgtaaagcgagatcacgcaatgttctcgacgtgctgtgagatgatcctgcttgagcttcaaatgagccaaggtccgatagcaccgtattggtccattgacgtgcgacatgtcgacatttcgttgcgagctcgaggtcaccgtccaagggcgaacaaggtccagaatccctttccgcccatggtcccgctcaggttcgagctcgcgcctgatctgcttccgcgtgtaccacacccactccccgtctctggctctctcgcactgcgctgtgcccttccgattcaggcacgaatcccatagaaatacgatcattcactcgctttcccccgtcgaccacggtcaagcttcgttttgcttccaccaccccccccctttcctttggaaagcgtcgcagtccagctgaccacgacgccacgacttctgacaatgatgggtggcgactatccacactcatccacaacgacgtctcggcccggtgtgtcacgtcacacttttcaaacgtcagacgacgtttgtgatctactactcgacattcatcacgccatagctgaagaacaatgctctatgtagtcctctcgtggcgtcgacgagcgattgataaggatcaaacactggccgacgaggggcgcgggggttgatcccggcagcggcaggtctcgcgtgctgcacgctgtacgtgttcgtgtccgtgttgatgaaaaagtgaccgacggggactaggacgccgacgaatgtccgtgacatgtcatacacacggccagccgaactgagagacacgtatatggtgcttctcaacgatcggcgtggcataaccggtatagtgggctgtctttgcaactttacggcccggccgggagaggcccacctgctcctttcgtcgaaccccgcaagatttgacccgccagtgttcgagaagcgacaatcctcgttcacgttcgatttcatttacgtcttgtcatttcgttccggcgtgatctgcgctgattacaatatgccgatcgctacttttacaatactgccttccgcttcagagtgccccggatactcaggcgtttccgtccgtcctgacctgctccttggcctcctccgtctttgtgttcctctgcccatacgccttggtcgcatagtccccgttctccacgatcaagttggccggttcctgcttttccccagcaaagaacctcttgaggatatccttggttccatcggcgtatcgacgttgcgcgtcgagggtcgttccactgtagtgcgcggtcatgccgttcccaccttgcaacgggttacgcatcgtccgccaaggatgactctgcatgtctgggggctgagggtaccacacgtcacccccgtaaaagttgagctggccagagttgagagcgtcggcgacgtcctcggcaacggcgagtgcgcctcgagccgtgttgatgaggaaggcgcccttcttcatcttggacaggaacgacttgttgatcatacccttggctaacaagatggcaaagacgtggcgtcaatatgcagcggacctggtgtcgaccggctatgaaatcaactcactctgagcatgtaagggcgtgttgacggtaatcacatcacacctccctaggaaatcatccagatcttccacccgcttacatccgaccgcatcgctcgcctcttggggaagcggcgcatagtcaaagtagagcaactcggcgcagtcgaaacctcggagacgttgcagcaccctgtatccgattcgaccacaaccgagcgttccgaccaccttgccctcgaggtcgaaagcgttcctggcgacggccgccacgtcccattcgccgttcatgacttgttcatgggctatcacacaggaaagttgcgaaaggtcagcttaacagattccctgcacggcggtccttcacagatgcgactgacctggaataaagtttcggacggccgtgaggatcagcgtcaggacgtgttcggcaaccgagaccacgttggagccggtaacctcggccaccgtgatcttgcgctcgttagcagcgtccaaatcctgtaagagcaacgcaacggtctaccgggtcaaaacaaagagagcgaggcgcagctcgaacatcccgaaaacgcacgatatggtctgacccgactccagcagtgatgcacagcttcaaattcttggcagaatccatgacctcgcgagtcaagtatcccgggtgaaagggcgtagtgatgaggatgtcggcatcgacaatgtgctttctaaactcgctcccgcttccctccttgtccgatgtggtgatgagctcatgaccctgatcggccaaccattccgaaattccgagcttgttctccgtagtccccaagagtcgaggctcttcttcggcagacttgccgccgtcgtacaggacgagaaggatcttcatacctttagatgacctgcccgccgtcgaagagtgaatacatcagctggtgctaacgttcgaaagactgcagccgccttacatgtttctgagtagacttcgttatagattcaagtatgtgtgtatgcgtgcgcgtgtgtgtatgtctttctggcgtgtgtttcaagagtctatcgcattgcagatcaagttgtcgcaagtggtctgcatcgcccctatatattgcgcggacgcttacccctgatcacatgtaagcatcgtccggacatttcgtgcgaaccgatcatcaacctggccgaagaccaccgtaccccttttaggcaaggtttgctcatcggagaattcttctcgatcatttgagatctcaaagaccgggcggggtgtcctgatcagcagatcacgagtcggtcgggcggtcaatcccggcgccgcgctaagttgcctccaccgtcagtcaggcttgcggcgagtttcatccgcgcgttcccacgcaaaatcagccggggatctcaaatcctcccggtccaatctcaaatgcgcgcatacaactctcaaatccttgaccctacacagcgatcaactctcaaatccgcgtcatgtcgactcgccaactctcaaataggacacggcccggcacggtctctgaagcggacgccaaggattatctcgtggggacatcaagcatcgttcgtacgtatattcacgcgggtcaccgtaaagacggccgaaaagcagatcacgagtcgcactgtatccttgacgatctctgcagcgcagtagcgagaacgttgtcccgaggggaacacgtcatgtgcatgcacacaatccagatttttatatttcaattacgttgacaaaagatggggagaatagatgacagagctctcgacccggaaacgaccgtattgtcgaacgaaagcgagcgtgagctacagaaagagagggggaaggagaggacggcgggaggggaagcgacccgtttacttggagagcttctccttgagcaagtccttgagggtcttgccgtccttgtcgaaaccggcgataccctcgtggagcttgtcgtaggccatcttgtcgttcttgaggtcctccaagaacttttgctcgtcgtcgacgaaggagacctgcgatgaacggcaggcggttgtcagtcctccatctcgtatccggtcagtcaccacgttgcgtctgctcaccttctccatggtgtctcgcctggcggtctcggactcgagcttcttgggaacgtcctcgttcgagtcgacgagctcctgcaagagcttgggagctgtagggacaagaggaaagacgctgtcagcggtcgagtcgctcggaatcgtcaacgtcacaacggaaactcaccgatactgtgtaaaccgaatggatcgagaagacgaaaatttcccggggtgcgcttctcgtcagctcaccgcgcttccctacgtcattcggacgaacctcccggcaactcacgtgaggtagtcacatccggccaaagccttgatctctccgacgtttcggaaagaagcacccatgacgatggtcttgtaatcgtgctgcttgtagtagctgcgcaaagtgcgacgaatcgctgatatgagtacggacgggactttacgggcaggacgctacccaggcgcgagtgatactgacttgaagatcttctggaccgagatgacaccggggtcggcctcgccaacgaagctgtcggccttctcgggctggttcttcttgtaccagtcgactgcacagcgtataaatcccagatgatcagtccggcccgtctcttccctcatgcacgtcccctagaccgcgactcacggattcgaccgacaaagggagagatcaaagtgacgccggcctcggcacaggcgacggcctgaccgaatccgaacaacaaggtcaagttgcagtgaatcttgtggtctcgctccaactctcgggcggcctggataccctcccaggtcgaggcgatcttgatcaagactcggttcctgtcgacaccctcggattcgtagagggcgatgagctgcttggccttgtcgacggtggccttggtgtcaaaggagagggcggcgtcgacctcggtggagacacggccggggacgatcttgaggatctccttgccgaattcgacgaggagacggtccatggcgttgttgatctggtggtcgatgtcgccacccttggacttggcccattcgaccgaggtgtcgacgagcttggcgtaagcgggcttgttgacggcagcgaggatcaacgaggggttggtggtggcatcctggggcttgtagacggagatggctgtaaagggaggggacgtgatttttgtcagtttttcgtgcgactagagcgttatttcgggacaagcaagctgagaggccgagtccgccgggagaacaagaaccccaggctcgtttcgctcgaccggtatgaccaggtcaaggctctttgcccctttttcggcggcgtctcttctcgcccgaaaacgtcgtccaggcgagattccgcatgaaaacaatggcagggaacattcaagaccgaggcacgggacgaggttcgggattgtccgctgcctcgcccagatgacgacgactcgactctgcttgacaggaaagtttgcaaaattggccaacccgagactcactctcaaagtcacccgagtccgagacgacgacggtgccggtagccttcaattggtccaaagaggtagacatgatgtgagtggtcgagatgatggtgagtgtgtgtgtgtacgtgtgtttttgtgagattgatctcgagtcgttctttttttttttggtttgaattgtttgaattgttgtgagtgatggcgttgaagtgggatatgatagtcgaagtggtttgttatatcagcaaaggtggtggggagagattgggtgacggaggggaggggaagagaggggtggcccccccccatctcattcggccggcccgagcgtcggctgttgtctcgtctttggcatcttcttcgtctgggatcccatgtccacctgttccttgttgaacgcgtgcggggcgactgtcgcacaaagtcacagaacagaacgatgcaccgaaccgacaaagatggtatccgtcagcctcgtctgtccgccgacgtcgacccgacccgatgcgatcgaaaccgagactcacgttccaacaaccagaccccctcgatcggcatgcactgcctcataaactccttgctcgtcaataccaactcgtaatacaggatgaacctcggtggaggttgagcctggaacaatgccgacgtcggatggatgtacaccgtctggttcgacttggtcgtccggtaccctccgtccttttgaatccgggccgtgttgaaaaagtagccggaacagatggccttttggatggggacgatatcgcccgggttcgggttggatttcacgacgacctcgacacgttcacacagcccggcgagttgatcccggacgtcccgtactcggcctagagatttgaactgcaaaaagttctcataacaccatctgatgggcagatccaggcatggcccgcgcgtcagcccctgatctcgctctcattcctctctatcgcgatgacgccccgtgcgagactcactgttgagaataattcgtatcgacccactgttcccaaatgttcaaaaaggtgaaatggtcgccaccgggcttttggaaattctgatgcgccttgtcggcgtgcatcttcttgtccttgggccggtaaagcatggcgtgcgcttcttgcaacattgagacgatcgtcaggacctgtcagacgaggaaaagttgaaagaccatagcggagcggtcagtcgacatttcccccgacgtccggctagttgcacacgccgctacactcacctcgtcggtacactcgaaagcttcgctctggatgatcgcctttgacaactgagggtccaccgggaactcggccatccttctacccaacctcgtcaactctcccttgtgattcagcgctccgagcgcgtacaagttttccagcgacttgatcaacgtctcggccggaggaggatcgagaaaatcgaaattgagcaggtcgttgattccgagggatttcaacatcaggacgacgttccccaggttggttcgctggatctcggggatcgtatcggccaagagctcgttgttgtacgcgtatttggtatatagtcggaacgctttgccgggcccgactcgaccggctcgacccgatcgttgagaggaagaagcccgtgatatctgtagccgtcacggaatgcaacccgagttcagccggccatatgcagcgatcatgtttcgcaccgatcactcaccggctcgaccaccagcgattccataccggtcttggggttatagttattctgcttgacgaacccgggatcgatgacgtagacgactccgtcgatagtgatggaggtctcagcaatgttggtagcgaggacgacctggcaaaggacggcaaccggtcagattcagagcgacggccgcgatagcacaaaggccggccgagtcgactcacctttcgtgcacctggcggtgtcggttcaaagatcttggcttgcatgtcgctcggcagattggcataaatcggagcgatgatcagctctggaaccttgtcaccaagcgccattgacgtttcccgtaaattctcttccatcgcttcgatctcttcttgaccctaaggataaaacagcacgaatgtcagctatttctaacggcgcgcgtgcacgaatcgtgctcacagtcaaaaagaccaagatgtctcccttgggctgactcgtatggatttggaagaccgtagtgaccgccgcgtggatatagtttgcctctggctgcgcggtatagtgcagatcgaccgcatatcttcgaccagggactgccagcgcatgccatgtcagtgaacccgggacacgaattccaagctcgacttgaggctcacttcggaagatgggcgcatcgtcgaaatatttggcaaacttttgcgcgttaagagtcgcactcgagatgagcaaacggagctctggtcggaatcgcgcaatgtcctgtcaatacaacgtttcaggtcagccgcgagtcaaacaatcaaacccgtatagctaggctcaccttgaccaatccgaacaagatatccgtgctcagcgtccgctcgtgcgcttcgtcaatgaccaacgccgaatacgtcgacaattcgggatccgtcagaaactccctcaacagcattccgtccgtcatatatttgagcaccgtcttgtcgctcgtggcatcctcgaatcgaatcgagtatccgacctcttgacccaagcgacaacccatctcctctgccacacgagccgcaaccgacatggctgccacccgtcgaggctgcgtacaaccgactttgagaccgcccttggtataaccggcttcgtgaaggtattgtggtagctgtgtcgtcttgccggatccagtctccgcttccacgatcaggacctgatggttagcgatggcttcgagtagttcatcgcggtattcgtatacgggcaacgacttccgtgtggcctcgatcttggaatctaatcggatgtcatcgtattcagcaaaggcaatgcagcgttgtagacaaccggccagactcacatttttgctccaattcctcgatctgcgtttgcaacgctcggtctttttccgtcaacagcccgtcttccttgccctcttggacccatttgatcgcctgactttcgtcaaagacatagtcgtactcctcctcgacaaacgtcttgtccagagcacccgtcgtataagtgctctgttcggtctgcctctgctcccactgatcgacgtccgtgacgaactgtccctcgtctttccgattatcatcgtatcgcttgtagaggacgttttgcttctttttgcgatcaatcttgccttgttcggtgatgtagtcctcgggcatgacgtatccatccgtcccgtcgtcaatcttggcacgttcctccatgatccgcaagagttccttcttcttgtcatgttcggccatttcgcgcttggacaacttttgacctcggaagaggatggcttcatcctggatctcgagtttgaggaggtcgatccgttggagttcacgtttcttcaggtattcctgacgagaatgttctctcagtccagggagagcgtccttcctggcttcgggatcgttggccaggtcacgtctcgtgccggcttcttggtctcccttggatgatcgatcggtgacgagcttctttgtggaatccttgtccctctgtttcatcctctcggcgaaagcgtctcgttccttggcatcctcctcttcctccctggccaaacgctccgcctcggtctctcggggcttctcctcctcgccagccgaatcgtctcgacgagcatatcgatcgtcgacctcccggtcccgatccctgatatcgggagagtactctctcaaccgtttcctctccctttccttttcctcctcatcgctgacccattcgttgccatcgacttctcgtttccgcgtggaccgatggatctttctcgaccccgtcccgtcctctttggatccctctgtcgacttgagtggcttgctctccttgtccacccggtccttgtcccgcttcttcttcttgtcctttcgtgatggaccgggttcgtcctcgagcatcagactgtattgcggctgttgaagcagcatggacgtctccttgtcctttttacgctctttgccttccgacttgctgctactccccaacccctttttccggggcaacaatccgtacaggttggaaacgaatgcctgggcatccggagtatccggcagcccgttggccgagaggttcgagtagaggtcattggcgttcttggaggaggtggcgagggtctgaatgtaatccactgtgctactgtctgacgctcccaggaaacgtagcacgttgtcgctgatgtattgcctgaggtccgacatgactcaagtagctggtggtcccccaggtcccggttgacagtccaagagcgatgcgatcgaggggttcaggaggtggtgtaggtattcgattgatccttatgagatgaggatgactttggttcggaaatctctctctctctctctctctctcgcttcattcgcgacggggagatgaccgaaacgccgagcgaccgtggacgaagagcaataatctacctagctacctacttcttgttgttcaatcaacggcgaccatcccttgtcaacttcctatagctatagctttggctttactgcagaataaccctagattgcaggactgaacctcaaaacacgatcaaagctcacccgcaacatgtcgcatcctcaccctcacccgcatcctcaagcacctgctggaatgacggctcgtcctccacctcagatgatggcccaggctcaaatgccccctcataccgcagccatcctcgacgcactaccattcaacccgatcccattcgtcctcaaggatctcccgccccgaccgaacgcacctcctcctctccccgcgctcctctgcccggaacatgaacagctcgtgtgcgacaagtgcaacgtggatttccgggacatcaaccagctgagctttttcatgagcttgctcaacccgagtcatccgcccccgccaccaaatgtcccgtttgccaagcaaggagaggctgttttgaagacgagggaagagggcaacgtgagcgttttccattcaacctcgacgaaaaacacagcattgacgttctgatcaaccgatcccctttgtcctgatcgccagaaacggttcaaagaaggcaaccatcgcgaagccggagccttgtactcgcgttccgtcgggctttctatgggaaaaccagcatgggaacaggccaaatcgtcgcaggatgagatcaccgcggccttgttgaacaggagcgcctctgctgcggccttgggagaatggcaagtcggccgatctctcgacaaacgtcatctctggcatcgcggtcatgacagctaatctcgtcattcgactgttacaaactcttgtctctcgtcttgggatgctacaggccagctgcgtttgcggatgccgacgcttgcatcaaactatcaccaaagaacgccaaaggatacttccggtaaggtctacccctccagcctgctcaccttcagctctttattccaaggtctcgtcatcctgaactcttccatcatgttgcatctcataggaaagcgaaagctctggacgggatgagtaggttcgaagaggccttttacgcgatgcagcgcggcgtcacggtcgagcctgagaatattgtcagtcccgcctggtcctccaccttggcgactctctccatctctgccggatctgcgactgacggcccttactaccctgaacgtacatgtcaggactataaaaagtacgccgaggagctcaggaagaagagcgggatctctcagcccgcagcggtcgaaaccgaaccgacggtcgatgagaagaagccgatcgaggaggatgtcaagcccgaagagaccaaggcggatgaagcatgatctatcgagtacggtcgttgctcccaaatcaccgagcattcatgttgtactacgaaatcgcatgcggagatacctttcaagcctcatgcagcgcttgtattgaggcgtagatgaggaaactatggggtattcgagattttcagacctcagaccaaagaagcgaggcaggaggcccgcattcagtttcgctttggaatcgtgatattgatatgctacacttggtattacaaccgtgacaacttctcgtatcgttactgctccgtccttttgatatctactgattcggctcttggccccggacaaaattcgcatcatgtccccccttctacctgacccaagccttgggtgccagaccccccttacccaatccccaattcctcaaggtgctcatgatgtcaaggttgccgaggttgtcaagaggtccttggacgaccacggttggctggcctgacccgagaccgtagttcagggcctgactaggtcgttctgccggtcgcaacacgcgggatgcagttcggtggatgtcctaagagttgtgttcaagcagggtgagacgcggatcgtggagaaagtgaaggggcaaatgagctcacctccagagtaacagcgtcgatcttggcgcacatctcgtgcaccggcacctttttgccatggatctgcgtctgcctcccaaggtctaaagcgccatcatggaccgaattagtgagtctaacacaaaactcatagctagtaccgatgctaaccttcgacttcaacgctcctgctctcgagcgccatgacgagactgctcttcaactgattcttcgcgcgactcagctcggtgggtgtgactcctcctcgcatagcccgggtcagactatcgagttgatacccgatcacgttcccgatcgaacccgcaaagtctggctgcactgaagcggcgatcccgaacagacctgtcgtacgcgaaagaaaagccgttagaagccgatttagaaagaggagtgtgtcaaggtatgctcacctgaatcggcataacagtgatggaaaccagcacagtagtcgacccggtagtattggttgagtacgttggtatacaaccgcgagtacattccctttcctggtccaccggccgagaaactgcctcctcctccgagaagcatctgcatcgttgccaatgcgtactgagggatgtgattgatcagttttcatggccctcgaagcatgaccgtcacacactcacgatatccgggtcgtgaatacccaacccctcaaaggcgacgtagacatgcacaaactcgtcctcgggcttgttcaagtagagttcgccaccggtgtactgagcctttgcgttggcgagctcggcatgactcgaggattccgctcgaccatcttgcagtgtcgcaaacgatttcgagagggacggctgagatgccgttttggacggatgaagcgtcttgccggacgacacggtcgaagtcaacgggtaggtggtatccatcgatccgaaagcctgttcggtcaaccggacgagctcttcatggtccatccctacgcctgcgacgaccatcctctcgggtcggtaccattcgctcatgtacgctcgcaaggtgtcttcggtgatgagatccagcctgtcctcagggcacagcagaggcatcccgagggtgttcccctggaaggccaccgtatgcaggatctcgggcaagatcatatcaggcttggcccagatttccctgatctcgtacgccgcggcatccttttgtgcttccagttcttcgggcaagaggagcggtcgcaggatcgaggacgacatgatattgagcgcttgagggaggtcggaggggaagatggtcgactggtacatgatggtctcacgagatgacgagcagtgaatgttagatcctagagagtcgatcaggttggacatttccgaggaggtgtattcggaggtggtcttccaagggaaaagcattcagatttggacacgtatagcgtggcagaggtcctgaacataccttgaatgccattcgatccatcaggtgactgaccccactgttagttgggctctcataccggcttcccgcatcgatgtaaacaccgagggcgtgaaagtgccctggagtcgtctctgtcgtcacccggatcttgttcggtagcgttgttacacgggattccggaccagaaccctgttaatcgcgagcaagcaaacatccaaccgttgtagcagtcgaaagaagggtccagtatggccgatgcgggacttacgaaagaattcgtcgacaatttcgccttgcccgtagaattcaacattgccaacctctggatagcaccggtcggccggggtatccggctatgagccgatttgaccagtgcgttcatggcgcccttgttggcggtgcgtgttgggagcatggcgagtctatgccgtcgaagagttcttgacagactagtggtatgtgtatgtcaattggtacaagagtcaactcgatccaaaacctttcaaatggctagtctagaggttgataatcggcggcgatgtcttgccaattgatctcgctcgttcggtttcggaggctgtcgtcgctcgacagatcacgtggtcaactacccgcttggacagaccgactctcgctgcgaccccgataatctctctcttgcaaaatgaagcttgtcattcatggtactacaacccgtcaataatactactactcatactagaaaagaagatcgaaagtacatcccgaggcccattacaacgacaatgagacggaaaaatgtattattctataaggtcttcgcgaggcgcattcctcctctccccctttgctctcccgaatctcaagacatgccgacgtcgccatagtgattcccattctgtgtatgatcggcataatgcgacatgtcctgctcttgcgtctcgtaaagtccggtccccatggtgaaatcgtcgtccgcggtcgaggggaagggcacgatatcgtcctgaccgtcatgcaaaagcccctgttgttgctgatgcgcatcggccaaagtctcgtgatgatcgtgaccttcgagcgtatgatacaggtcatcggcatgaccaaagacgtcttgctggtcgaccatcttgttggctccactgttcgatggacgcggcttgcgcggtgcggcggcgacgggcagacctgcagctcgttgcgctcgggccagtctctctgcctctgcggccgccttggtctcttgcacccaggcataacccttcttacgcttcttcctctcggcctcccactgctcgtccgtcaagggcatgagcatagctcccgcaatcttcttgacaggggggccccgtcgcctcttttcgcccgtccgagtggtcgtcaacgagaccgccctgccgggactaggtgtgctgtacgtgctactaggcaaggtccgaccgatcggaggcacaggtggtagctggccccccgtcgaagtcccctcgcccgtttgcccaaactgtgcgaaattgatgctcgcgtatggattgtgctgaagactgctgtagtcaaagttggcgttctgcatgtaggcgtccgcttgcccattcgaaaacatgctagcagcctgaaccagcgtcgagacgggattactctccacatcatcgtaactctgctgatagtacgcttcgaccccatgatgatgttcgccggtgacatcgactacggcagactcgttggcctgctggatcagcgcggaataatcttggttgacgttggggtcgtccggcagtgccgcaactccggtatcagaaccagctgcctgattgaccaagagggtatcgtagctgtcttgaccgagcgcttcgagatactgttggttctccgccccgtcgtgatagtcataggcaggcaagggagcgacaggtggcgaaggtcgtctcacgcggctcttgccacttgtgctcttcttccgtttgatctgagcggcagcctgattgtccacgctcgcacttccactcggaccggggtctgccgattcatcatcgaattcggtcttgtccgactccttctttacccgcttcttctgcccactaggcgtcaagctggtgggagggagggtgaattcaggtggtggcagaccagcttcttgccgagccttggcttcgcgcctagcttgagccaaagctttcatcgagttgagccaagcctgacccttcttgcgtcgccgacgttcgcgctcgagagccgcgtcttcttcagcaggggtgacgtccgtaatggcagcttcaagtttgggtcgtatcctggtgatgatcgtcttgaaacggcggggaggacgaggcttgcgagaacgtcgggaacggttgtatttctccatgtccggagcggtggacacgatttctcgttcgttcatttccatctcttccaggtccgtcatgtccgaaacgctactccattcgatctcgtcgacggtgagaccatgggtgatgatgtatctctggaagctgtcgtcgtcgtgaccgtcgtaatcgtctggaccgtaagcagagcccggtgaaccgtagtgcccgttttcatagttttcgtaagttggagtcatcatgtcgcgcccttgcgagctgcgaggcgatgcgacggcttcctgagcgtacatctccagttgagcggctgcgagttcggcgggtccgatctcggcggggactcctccctcctgtccatttgtggcacgctgcattgccacgattccgtgcaaggcttcaaaccactgctgatccgattcgttcgtaggtcgttgtcctgcggtgacgctatcggttgctaacggcaatgaggctggcatggctgattgtcagctggataccgaacataacagtcccacgatgaccaatttaccttgttctgcaaggccgtcctgaggcgccatgccatgatccaatcctgctgctgcctctgtctccctcttcttctttgcatttccctctacttcctcctcttcctcctcttcctctgcctccgcttcgggctcaccctcctggttgtccgaaggccctttcttgccttcatcaccatcatccccgcctgcgtttccggcggcatcatcgctccctgccggtggatccgttgcatcattcccaccaccagcgttatcctgaccattgtcaccatggtcaactccgtgcgactggtcctgacccgcttctccttctccactctcatccatgcgctgatcctcggccgactctgaatcttgcagcggtgtgttcgtaggctcctgctcgaccttgaggttcttcacatacccaagaagattgcacaggtccttctggtacacctcgtaatccgagggatcgaccagagtcttctcgtcgtcgtcctgttcccggaaagggaagactggaatcgaccgtttccacatctcaactggatgcgccgcgaaaggcacgtcgagcatgaggctaaagacggtggtatcggtttgaaaggtcggttcagcagaagtcgaagcacagctatagtactcgtccaggtttcggccgggatacacatatcctggcggaggcgcaacagcacgtagagcgatggccctgtgcatgagcttgagcgaagtgacttgtgcggctacccattcaggaccctgtcgacgtgatctgcgttccgcttcgagctgctccccgttcagcaaggccaatcgcgactttatcatgcggtccggcgccaagatcgcatggggtctcgaagccttgctctgcctttccgctcgattggccttcttttccttcttgacagtctttggtcttgctgttgatacgttcgtcgaggtacttgcctctggctgaggcgcagcgactggcaagttgatctggaatgggggtaccgcatggacaatctgacttatcggcgcctcttgtatgatcacgaggttatcgacagtggcagggggtatcggtttcacgttgatgacggacggtgagggtgctggaggcggctgaggtctctgattgtcattgccaacactgacagacctccgggacggctggccttcttgcgatctcttgctcggtcggcgctccctttcagactcggatgccgaggtccaaacggtcgaactctccaaatcatcgtcttcagcagcgagtgcgtcaatctcgttcatttccttcgtatcgttcatttcctgttcttccaaatcttccgcgtcaagctcctcgaccgctcgagcctttccagcgcgcacagaatctcgtctcgaaccagaggcctcggaaactggcgggacggctcggttgcgaggcctggatatcggtccaggggattccatgtcattgtcgtctgagccggtacttatgccactgggaggacctgggacggcgacacgtctccgcgaagattcggcggtggcgcgcattgagctgctcgccacggcggccgcgagactgctgagctcattacaaatgttcctagccagacgagcagtctcgcccatctgcgctatgctcctcttccgaccgttggatcgttccagcgagatgccgcactctctcgcagccgccatggcaagctctctcgccttggcgagcttcttgatggcggattcggaaggaatgatgacgtcttcgagtttccgtctctttggtaacggcgtcgtcggtggcgaggcgacgtctacagcaccgctcgtcctgctacgtctactcgacccgacaacctcggtgatgctttcctcgacgatcttgagctttttgaccttgttcggcactccctttggccgcccgcgctttttcttgataggcaagacggggacctctgggaggttggatcccgaagcctgattgctggactcgcccgttgaaccgctccgtttccccaaccaacctgaacagttggtcgctccgcagaaacatcgctgacgtccctcggcggcgacagccgtgagcagcgattccgggtgatcgacgggtcgcttgtacgtggtgaaagagtcaaagttgtagttgtaacacagctagacaaattgcaaatcaggctggatccccacgcgatgtggctccggcgagcgcttacctcttcaccagctgcgatatccctcaacgcccagaacccaatctcgtactcctccagcccagcgcccgccgtctggtactttcgaacctcgatattgggcgaacacgaatggttgatgaacctggcgtcgttgcccttttggccctgaagaatacgtgcacgatgagccccttggaaacctgatctcggtcggaacgcgactagacttgccgcatcgatgacttcatccatgtcgtagtcgagcgcgtaaaaatctttcctccctgcgtacaccgtcctgatgcggttaaagtaggtcctacgagtgttgaaccccgtcagcctcaccgggataccgatggacgaaccggatccgcaattgtcactcactcgagcccgatgatctcgcccctataatccatgatgaattctccctcgtcgacgctgtcatgaactttcaacccaaaccctctcgaaccggtaaagacgaccttggtctccttttgtggacgacggaagagtgacccgttggtacacgtcggtctggcgggacaaccttttccacagagataattcatcgcgctggtgagaggacgtcgtcgtgaaatcaaaggtgagcgaagacgatcgttgacgagcagggcgcggacggggctggacttgccggttgagacagccgtccttgcatccgctggcaggcgcacagttgcagatcaccttggcgtcctcggtgtaaggtttcctctccacaaagatatctaaaccataccatgaccccacccggtcttcagatcagcttctcatctcacctcgatcgacctggtttggtctgaacggaaaaaaagagacccaaaccccctcaactcactatgcttgatctgtttgtaccgccccggcgtacgtttcccatccagcacgccgtcctcgacgtccctgaccagatcccaggggagtacgaaatccctctcttggttgacgagcgacttcccccaatacatggggaggggagggaaactgtccgggatttcctcggctccacccgaggatgatgacgaggtcgcgtcatcatcgtcgtcgtcgtcgtccccgtcttcatcgtcagaggtggaccgggaaggagccgtcctgggtgaagtctctgaagcggtcgggatcgaggcagaggaggtaccaggttgaggatccggtcgaccggaccctgacccactcgcaccgatcccttcgcctctcaatcgagtccgagtgaacagggtcgataccctccctgacctcgttgacgacgcgctcgggacctctcgtcctgtatcggtcgtcttgaacctccgatcgaccttcccctcccgccctttccccttggacggcctggcatccttgtcattcgaccgggaatccccttcagaccgagtccggaggtctaccctcaaggacggtctcatcgggctcgggatggtgctcggggtggatgatgcccataatcccgatttgagatattgtttcccatacgacctgggtttggtacgtgcggaagatctcgtctgtttgtcgttcaagaggatggtgttgacttcgtctacagacgagggcgaacccgagagcgggacggcggctcgggtgctgggtcttgtgctgctcgactcgacggcgctggatgtcgaaggtttagtgttgacggtggtgatagtggcagtggtggacgtggagctgggcatgcgaagggagtatgaacccttgatgagtcccggaagggtggtgatccgacgcgtacttcgggtcctcgatgcgatcgtctttcgaccacgcccgcggccctttctcgagtacgtggcgaccatatcggtggtgtcgtcttcgtagctacagatccaatccgtgtgaggttacggggtaggcgagtgttgatgtcgcttcagtcttgtttaggatagatcgtctagccgggtccgggtctatctagatcaagtcgcgcgggcttccgtcgcgttcgagagggccggggggggtgatgatcgagtggggagatgacgaagtgcgcgactttcaaaaacgatgatgacccatggttcgaccgtccggaatggttctcgtagctactcttgaaagatgctaacgtatggtgatgatgaccttgccgttcattgtccaatatggataggttgataggggtcgtctagtagctagtagtagcagtagcgtggtggttgatgatggtggtgtcgactcaagcgcggctgaatccggggtgagatgcgcttcaaagtggcggaaacaccaatgttggcgtggatttcggatccggaaccattggattacggcagattggtactgattagtcagcaaaacagagctatttacaatgtcgattagagccctaacatgcttaacacactctaccctacgctgaggataagcacggatcgcttgacatctctcgttaccatcatgttatgcttgcccaccttgactaccatcgccgcggaacaatagtatagaacatcaggaggacaccacgatgtctataccttccttttcatcctttcctcaacggaacccggccaagctcgtcgctccgtcaccaccaccggccacttcgttccccgctcgagtaccgctcgggaatgacgaatcctcacgagcaggtcctagcttttcgtcatttccccgtcggcccaccaacgaggtcgaggtcgactcgtcggacgctcggcctcggaaacgtcaagatgctatcgacgaggtagagcggaaatcaaaagacaagaagcgacgccatagggaggacacggacgatgtgggcagggatcgggaccatcatcgtcgaaggcgacgggaccggagtcgagatgcctactctgacgatcggcacgattctgggatggtcgtcaacccccaagacaagccggaggagaaggaaagacgtcggtctcgttcccgggatcgtagacggagagacgagcgggatagaggtcgagatgaacctcgacgctcacgggacaaacactcgcacctcgaccgcgatcccaatccacgtgaacgtgaacgtcaacgcgaacgagcacaacaccctaccatatccccgtccgagacgaacgttctcgatcctaaagaattctacacggacacgaggggtgatcaggatatcctccgatttggacctcagagggggatgcggtatatccctatcggcagtgagtcctctgtcccgtactccaccttgtacagtcccgcggggacccacttcccgcacgtcgaggttcagcttcggatcgcgtgctcatgggaacttgatcgactgatgaacagaggggaggatcgtcgggctgtcagaagcatacaggctggacctaagagaagtcggaggtgggagaggagttcctgtcacgctcaaatccgattcaactgtgagtcatggcgcttcatcctctgaaccgttgtgctgatactcgtcaccttgcaacttgttgtgcaataggatgagacggccagagggtcgttgttgctccaaatcaccggaccggcccttcgtctaagattcccaaggggggacgcttccaaggatgtcgatgcacaagaagatttcatctctgtagggaaagccagacgaaagatcgcacctcctgagcaaaccaaggacagggtggaagcgtattgggaggagcaagatcggcgtgatcggtcggaatcgggctcgggctccgagaacgaacaggaggaagaagccgtcgacctggacgtcgagctggaagagaccgaggaggagcggcggcgtcgtcggatcgtggattttgaacgtaggttgaaggaacgcccggaagacgtcgaatcgtggatagcatactcgcagcttcatctgtccgggacatcatcgtccgggtcgtcggcaaagggcaatcaacgagggaagaaatcccgtccggaacagatctcgactaccaaacagggtgaagccgagatcgctaccgagatcctgtccaaagcctttcgcgcgttcgagacgaacaagtcggaccctcgattacattcggcctttttcaagctcgtccagcttttctggccagccgaacgagtgactgccagttggaaggcagtcctccgcgaattgaccgaacgccaaagtcagggggatcaagcggggctcatgaatctctggttggaatttatcgcttggagggaaggcagagggctgggttcacaaaagggtcgagctgggacggccggatcgacgggtggggtggacgatgtcattgacgtgtacgtcgagtgcatcgaggtcatgaacaatgccaaaaagggcggaggggagagtaagccctagtatgctgccgatcaggccgtacaacatggctaatgacagtttctacagacactcggttcttggaagaaaatttggtttacctgctcttgcgttgctgtctgctccttaaacatgcgggtgagcagatccttcttcttggcacgccacgcgatcgcagtcctcatcgtacattcaaataggctacgccgaacgtgctacggctaccatccaggctatgcttgaattgcaagtcccatccacaatcatgtcttcctcgatgagtagctgacgaggggaagccttttaggacattcttcaagcctgttcatctccggcgatcgctttttcagaatccgatagattgggagacctctctgatccaggacctcgaagcgttctgggactcggagcacgctcgtattggggaagcgactgccgctggctggtccatatggaagcgcgatgagaagcccgacctcgacgcactggcagccgaggccgtacaagagaccataccgagcagtgataaccccgacccctacacacgttggtaccaagacgagacgtctgctgagagccgacatccgcgaccagccagagcgctggatctagccgaagacgacgaggaccctttcaaaacgatactcttctccgacattgaatccttcctgttcgtgattgaagatcctgaggtcaagcttcaattcgcttttgccgccatgaatcttctaggcgtcccatcagtaccgcctggagtcggctcggactctccattctacacggatccccatctcagctggtcgctggatgtgaaaattgagcggttgtggccgccgcaccgagctcaaactggcttaccactcatcgaaagctcttcaggcccgtctggggccgaaggaggggtatttagctgtcccttgaaggcatgggcgatggatcaagagactatctgccaggatgtccaaccttggttcagcacgatcgataagaatatcgacggtcaatgtgatctggcactcgtcgggtgagtgaaacgaggatcccgcggtggggcctcccaagactgatttgaaggctcttttcttacagtaacgttctcagacagcttcaatctgtcatcctcgaaccaacgttcaaaaccgcctacctcgcaatagaaagcttgcgaagccgcaaagggtcagccgaatcttacgagagttaaaggcgtggcgatgtgttgacgatccgaacaaaatcacagcgctacgagagctgcaaagacgctcatcgcagctgatcagcgcaacttggagctttacgctagctatgcacgaacactgcgtcaacagaacaagctgaaagaagctcgacaagtctatgcgatgtgtttgcagaccatgacgggtgatgtggatcaggtcgacgtgcatgtccgacatcaactgtcactcgaatgggcccagatggaatatctggcaggggaagatcgtataagcctgaacgtgctgatctcggtggcgagcggtctcgaacaaggtgagtcggctctcggatgttgtcgcgatcatacacgctcactgttacattaactgtgctggcacccggacatagtcgagctcgacgacctgaatagagcgccgacaggtgtagccatcttgaaggccagaaatgcctttactagagcggatccggatgacccgtgctggaccaaattacgttacctatatcgtgtgcagcaggagtcattcgagctcgtctttgaagatctacaatcagaggtgcagcttcttcccagcaacacgtctgtgcaggaacagctcggtcaatttgcctgtcaattagcatgggctcataggcagcgaagatatgtcgctccgaccgtgttgcggccgttcctcgaaggcctaatcacggtgtacccgaacaacacactcttcctatcgctctacctggccaacgaatcgagcagtcaagtgtttggccgggtacatcgcacgatcgaggacacgatattgaactcgaccgagtcgagcgcaaccgcctttttgtgggcagcatgggcagaggcacgatctggacggggtgaattttggtcctcctcaagcgcggcagccgagcgcgtccgacatgttttcgacaaagctctggaagttgctgggtacgtcctgtctcaggagtggagcttctatgccgtcttccatgctcaaatctagcttactgcaggaacgcaagacggtccttggcgatatggaaagcctacatcgagtttgaggcccttcaagggcggtctgatgcggccaaacagctttgttatcgagctttgggcgagattgggacggctaaaggtgaattcacatgcctcgcaccgaattctatttcagctaaagcgcccatgcgccgtcccagaactctacatgcttcccttttcccctttcctgcgacaatactttaccgcaaaagagctccaagattgggcggaaatcatgatcgaaaagggaattaggatcagactaccctttgaacaatactggcgatcgacttctgcgacggactatcttgaccgggatgacggtggcgatccgatgaaggaggaagatcgagtgtttgacttcttgcaagagcgcaagacgttgatgccgtattgatgaacctagtcgccaacgcttctcgaggtttgggcccgatctgagccgaaccttgctcggcagctgcagggaattggcgggccgtagttcgggccgaccaatcatccgaatagtgcggtcgcgtttcaatggtgtaatcgaggctcggttgaatcgaagcaactcgaactttccacattttgcttgactgcgggaacactgcctatatgatgtcaacatatagaagaacaacccgactcatgatgaaaccgccgaacgcgtacagagcgggccgagtcgggggtgagcattccggatcgttcgaaaccttctgtacgcgtgctcgccatcggccatgacggcgagaactgcgagcggtttgttgttgttgttgtggtcggtcggtcagctagtggtcaaaaccttctacgcctttcccctctttgcccctttctcgagccctgggcgtcaggccgaaacgcactggatcccaagcgaactttttcataggtcgagcgcggcgggaaatgacgtcacggttatgccgcgcgcgctgccacgccgggagaagttttttcctgtttcgaacgagcaaaagggcgcggcgctaaaccccaagcaggagatctcgccccggtcgcttcgcttagctccaatattcaggacgacatgtgactcgcaccgccgagcactaaccggcttgggccacacagcctggagccgagagccgccttttggaaggtttcgagcacgagctcgctccttgtcgaccaaaattgatcgtcgttctgagtgcatggcgggcaaaggcaggggagaggccggaggggcggaaactccgcacggacccgatatgacgtacatcagaccgaaagctcctttgacagctgatggcgcggtggatcccgtatgacgtcgtgaccagtttagagtttttcgcctcttatcgcagcagtatctcgccgtttgatctgatggtgcgatgtatatatactggggacggacttttgcaccttgcagctatttccccttgtccgtatttatctcaactcaaatcaccgacattcacaagcattttgcgcaactccctctaaggtaaggctgcaatcaggctgagagctcgaacatacccatctagcatctagccagtctgacatcccgcctctcttttcatagccaccttttagaagcacgcaaagcataagcttccatcactatgggtaacatcatcagcagcatcgcccgaggcatcaacgccgttctcatggccatcgtcaacgtgagtcccacccgtccttcctttcccaccatccggccgctcgagcgctgactccggtcttccaacgtgtgcgcaggtcatcacgacgatcgtctccgccattgccaacgtcttcttggccatctggtacttctttgtcaagctcatcacctgtggcaaatacggtggacagaggcgtagcgtgaaatggggcaagagtagtcgtgcgagggtataaggcggagtctgaaccgtaagtgatttcgttgccgcgctctgtttgcccgacgatgctcaacggaaccttttcatccatgcagatgtctacccgggacctctttttacgaccacaaacgtcttgaccaatacacgagaatcaacaacagacgagaagggtcgagctttcgcaacctagaatcgacttgctcttcgtcataactgtatcaccttttaactatgatcacgcttataatcaaatgctttcccgcttattgcgaaccttgagattgtctacctgcctctgcctacgggatatgtcaccaggatcacttgagtataattcagtgcatcggtgactaatcaaatactctcatcatctacatccatcttgtcactagactcgcccttgctgctcttcgacctggtcgatcgttgccgcaccgaactactctcgctagtctcgatctttttgggcgtcgtcatgtccaccgaaacagctgtatccggcgttactggagaggtaggtccaggagccaccccgatcgagtcggaaccgcttgccgagtgacgatccttgggagccgggttgaaaaagttgcaatctgtcatgacagtaataatttgatttttggggacgaccgtcaaccggccgaggcggacaaagagccgatcatccttgacttacgtcgacagtaccactctacaaacagcacacgatgacggtacgaccgaagatcagtctcgtcgaactgggccagacctgcacgtcccgttcagactcacttgtagtctcccattccagcttatcccccaccaacccgttgtgtcgaaaacacctcgcgcataccaaagcatatttgttctgcagtgatgtggctatcgacagagtcccagtatgagttgccgccatggatcgagccttctcatgtcacgcgttaggccatgcatcgactcacatggatcttcacccatcaacttgtcggccagatgatctgtcccgaggcgagagaaacatggggcgtgatgatccgatcagccgtcatgtcatgatgactgtccctcatctccacccatcgactcaccgtaccacttcttctggggtacaggcaagacccccggtccatccctgacctgttccctggcctgattgacgagcatcaactgttgcggagacatcgataccgggtttaccgggatacccggctgagctggattcggtcgacctgcgatggaagcgttgacagggcgacgggatgacggagtaggggtgttgggtccgttgacgttgacgttgacattggcgttaacgttgggtttcataggttgacctggtcgtgcagacgtgcgagcctatatgggtgcgtcgcggcgggggtcaagatcgagagcagacgagaccaagatgccgacgtgcagcgcgagtgtgatgcctttcgtttgcgcaatcgtgcgacctaccgatgcctgaccctcgtcataacgatccaagagttcctgcgtcttgtaccatcctgacgccctcttgacctcttctaggctctcgtgttgtttcttcagcagcttgccgagatgagcttgttcgtgagtcctctgccgggcgtaatatgtgtgaagggcacggttcaggatgtataggctggggcgaggcgattgcggggagcagcgtaatgcggtgaaaggtaatcatgtcagggacatcagaacttcggatcatcccctcttcctcctccgtgcgatttcgacctagcagcagagactcacaagacgggccatccgactacccctccaaactccatccctttgagccatccttcctcccccctcccgagtccgaccaacccccaaggcacggcgcccaaccaacacagtcccacccataccgcccatatccctaccccgtagaggttgaggaagaggctgagccgtctttcacgcagcctgatctcggctagggattgtttagcggtggtgatctcggtggctaggcgggagaggagggtatcgtagtccgtcggtcgtttctgaaagatgccggacgaggtcgatccagttcggttcggttaggttcggttcagtgcaaggagtttccgcgtcatgtatagagcaggatgttcggtagatgatggaaagaataaaggaaaggacagacaggcaggaccgagcatcatgagaatctcgacatgtacgggggctgttccacccggacactcactcgaccgtacgccaacgggttgatccatgtcaaaatacccatctcggcaggaagagagatatcgagatagctggtcgctagtgagtgagtgatcctagggactgtgtcaacctatttatcgtgaccccgacgtttctgtccatccgtcgagcttcttgtgagtgaggggggaaggagaaggttgtcgcgggttgatgattcatgggaacctcgagtttcgaatcacgtgacccgatcaaataggggaaaaggtcgcttccggacgaaacaccccctgttgtgtgttcctcgagacccgatctactctggacctaaagcaagacgagtgcattttggcgcggtcgggaagcatcgacattaacggtggtcgtatgggacgaccccatcctacccaggttcgagatcgtcggagttcaaggcgatgacgcgatcgagcgagagcgctagcaggtcatctaataccgagtctcgcctctaccgtcatttcaaccgatgggggagatctatggtctgagcactctgatactgaaagacacgagctgaatgagagcacaggagtgaccgacagtcatgaagaagtgcaagtttagcagggtgaagaggttgactgataacagtcgccaacgtagaccgagagctgtgaagcgcggaggatcgcgtgatctagatcgtgcttgcacgcctttacgatcgatcctgcatcctcgacgagatgggatgtcatgtcaagattcatgattggtttgccactacttgcgatctactactttggcacttttctaccgagatctatccgtgaaataccggcggtgaaccacacgacccctaggtgccagccgatcaattctccttccgaaaaagcttccgttgcctgtgcccccgtgccgtgaatttacttccgatcccgatcttcccgccgcgttgtctctctcttttcgggttgaaatgtgttgatcatcaacttggggatcgagagattattgtcgagattcataaaaactccaacaaccatcatcctcgccacatccgatcatcaacacggccacaaccacaacctactctccaacacacacatacgcacacagagacagagagagataaactaaatcgagaccaaccacccctcaccatgtcgccttccctccccgcctctcatttcctctcgctcgcccccaaccacgccgcaccgccagcctcgctcctctccccctcgaccacccacacgaccacatcgaccgcctcgctcccctctgccgtcaataccgccacaaccgcatcggccgatttcgacgtcgatgtcaggacgggattcttgccgttcgaacccgccgtatcgaggttgccggaagagtgggccgtctgggaggaagcgttgatcgcggcacggggcggcggggtcgtcggtcaagggttgagactgggtggagccggctcgtcgttgtcggatcagagggaactcgtctggcaacgcgggatccaatcgatggcggttctacctgtcgccccgcttcgtcgatccttgcctcttctccgaagggcacaccaggtcctcacctttctcctgcacttttacgtgcacatacaacccgctggaccaccccggaccaccccgctcgagatcccggaatccatctccatccccctcttgtccgtctgtcccttactgggtctacccccgatcctcacgtatgcggatacggtgctctacaactctcacccggtgaaccccctcttgccaccttcgttcgagaggaacccatacacgaccaccttggagagctttaccaacacgcccgacgaggctcatttcttcctcacttccactcggtgcgaattggccggcgtccaggcgctctccctcatgcgtgcatcgctggacgaggcgttcatggccgacccgctcgccctgacccggttgacgggttatttgagtgaactggcgggcaagatcgatttgatcggggacatcatcctcgacgtcttcaacgggtgtgacccggccgtgttctaccacgtcgtccgaccttggttcaagggtggggatgcggacggtccgggtagcgccgggtgggcgttcttgggacgagctctggagaacgctcaggatgccgagttccacgacgaagagggcgacgacgaggcgaccgctgctgccgctgctcaagagtccgatttgaaggctaggaaattctccggtccgagtgccggtcaaagcacgctcatccacgcgctcgacgtctttctcaacgtcacgcattctcccctggacgacgcaccggaagaggtcgacccggccacgggggaacgcaagaaacgtccgacggccgagacgacgttcatgacccggatgctagagtacatgcccgcgccgcaccgagctttcctcacgcacctaggaacgcaccctcatcccgtccgggagttggtcatcgagaacaagcacacgagacccgccctcgtcgaggcgtacgacaaggccatctcggcgttgaagaggttgagggagaaacacatgcgggtggcgacgctgtacatcatccaacaggcgagaaagcccgtcacggacgagttgatccggatgggcgctgcggcacctcccgctcctacgcccagctctagcaccggctcgacggggaaacaacccttggatctgagcgagttcattcacgaggccgaggagaccgacgacgagattcgggggacgggagggacggcgttgatcaagttcttgaagatgtgccgggataacaccaacaagaccaagatcggtgggagctgaaggaagggctccggaagaagtgtggtagacggacgtttcgaattggggtcgatttaatagatgcgccggataaagggttgtgcattagagctcgcgagtacgggctgtgactagggatcggtcggttgtattcacgcctagaggtcgccccgaggaggggcgatcgtcctggcttctcgtctagacgatgttggcgcttgtatatgcatggaatgttgcgtcgaacatgagcttttgcgacaaaggaggtttcgcctgccgcacgcagttttcgtcgagataatgataaagggagttcagagcgggtgacagaaagagcaacgggatccttgaccaatagatagcagatttttgcgctctcgacacatggggatgagctaatcaagctctccgtccatctaacccattgtgcagggttggcatgtcaatgggagggcatgcatgcctttggccttatatcgtgacaaagggacgttgctgggagcgtcagtcctgtagactgtggaccctttcgaaattgggtagctccgtctgtggaaattgtatttatgaacttgaggtcaggcgtggaacggttgagcttaggttccgacgcgtttcaggaatgcgtcactcggaaacgtttccggcatggctgaaacgatcgaattcgagagagctcgctcctttgtttgttgacatggcccggctgtaatcggttttcgccatgggctctgaagacgaccgtgaaggcttccggaacgacactgagaattggatatatatttttataaatatggattcaaggttagcatattgtagcatcgtcttgagtacatcacgaagttgggacatggaggatcagagtatctcaaacgttctgtgcgtatgagcaagatagacatcatgaatacgctcgaccataatccggtatgctgatgagcaaaacgacgagctcttgaacttttgcttgaaaagttccggcgggcttgccgagaccgattaccaacttggttcacactggcatcgaagaggagtctaatttggcgcaattccactgcaagcgcaaaatcgtagtctggcacttgaagcagaggcatggaaaatacgtagttgtaaatgtttgagcgaggcaaactggaatatgccagtgtcaaatattggaagtgtcgtcctcggtagccggcagtaatacccgctgatcgatttgtagccggtgaccgctcgtcaagtccatggatgtcctgttctccgacctctatataggtctcttatcaccccaaccttgtcctcatttcacgccatcacacacgagctttgctccttgaccagcaattcgagttcggctgacatcaactggtgttgcacaacgatatctttgtggcgctagcactccgctcaacacagctcttttcctagaccaatgcactcgattcgactgaaactgaagaaggcatcgtcgtggaaaagctcgataagtagtctgacagacgctctggaggggattacgacaacgtgtctgaacatttgcttattgtcctgtgtctatactacattttgctattccgactaggtcgcgaggtgactcatctcatgaccatccgcgagctaatgcccacgcctcgccttttcagccctaccgttcaaagctcttcatgggcactgactcgaccagcaacttcgcgtccgtctaccccttcagcgagcacgttgaggaagtcgtagaccaagtcggccgcgaggatgctcgttaattcggctgtgtggatcgaaggatgtgatttagcatatcgcatcacgcttcgaagatttgtagatggcttaccattcgtatcataagcagctgtgacagacggaaagtcgtacgagattagatggccagtctcaaggctttgtgtgacggggtgcaaaagactcacgcgcgacctcgacgatatccatgccgacgatgttcaatcccttcattgattggacaattcttcgcaattcccttgaagaccagccaccggattcaggcgtccccgctgttgtttagagcaagtgcggttggtcaacacctcgtgtggcagacgccatgatgacctcgacgatatcggacttactagccggtgcagcgctagggtccgcgacatcgatatccaaactgatataaaccggtccagccccgaccctatccttgatcttcctggtgatcccttccaaacccatatcgtccaggtcgtacgtatgaatgagatcaaaccctgccgtcacgtcatcctgcaaatcttctgggccctgcgatattgaccgttttcgtcagccacggcgtttcggtgagatcgaaccggacgtagcatactcaccgagaacctggttcggatccccgcgtgaatgttgctaccgggcttgatgtaacccttttcgtaagcgtgccagaagaacgtcccgtggttgatatccgcctgcggggagagggaacccatgtaccgcttggggttccaggtgtcgatgtgtgcgtcaaagtgtatgaccgagatgggtccgtaaacttcgtgcaacgattccaaaatcgggagaacctgtgggtattccgcggtcgtagcattagcaagtccctcttcggatgtgtggtcaacgagggctcagacatacgatagtatggtcccctccaagactaataaccctgggatgtaacctcccatccaaaccctcggtaaagccaagagactcgaacgcggttgcgtttggcaccttgcgggacaataacgacgcataagccgcagcgacttgcggaatggcaatgctggggtcgaacgggctgatcggcacgtctccacaatcgatcaccgagtagccggattggtacgggttgatacccgtcacgctcgagtatcctcggatcttggtctgtcgacgagagcctagagatggaggacataggtagcccaatcagtgtcataatagcttgagaaggggccttgaggaactcaccactcctgataccgaacggtccgaatctagcccccggtcggaagctcacggcagagtcgaatggcataccgatgatggccacgtcgagctcggtggacggctcatcgagacatctcacgtgcggcagatgggcgaatgaggtaactcccgtgaacgagaggtccccggtcttcccgtacttgctgaaccaagcgtctttgctcgcaacgtcatcgtggtcgtcgttgtggttgccgtgggcgagagccagaggcaatgcagcgagcgcgagtagtgaaaaaagtcgaggcatatcgtcccagtaagtgttttcgtgtcgtcgtttcgtcgacacttgagcgctgataccaagcacgaagactctcttctagatgctatcgcctatcttataggttgttgtataggtgtcgaacggataaacctggatcaaccctcgtctttcgtttgctcgggtttagccgatcccggtgtcgtccgcgggatcggctatggctctgagggagactttcaccgttataagcgacacctaccttctagcttccagtctatagtctacctcttcacactattacactaggactgcatcgatgtgccgcttttgaccttagttgatccaggtttcgtaagcgtgagcaggtgttactgccacagatgagaaacggtcatttcgatcatttccctttgcttcgcgaagcctgatcgtttgacctaaagagtgaaaaatcctcaaaaacgcataaaatatagaatatatgcgttttaaggttagcccgagatatcattaattcacgaggctcaaggcatagtgcagtctaccttattactactgccctgatctctagtcaacctgctcgcaagcatccctctacaaccttcagtcgctcggagctatcgctcacgtccaatcaccatgaattccgatccttcggcaagtccaccttgccagccctgatacgtgatgccaagctgaaccgtgctaatggatttctacttactctacagtaccctgccgtcgccgactttatcgaaaaattccctctgcaagccggatgcatctattcgacgtatactgacctcgcgttatgtgggtctacgggtcgacgtatgcggggacgaatcagaatactgactctcttccggttccgtctacagcccagcaatgggaagagatcagactgcatgagctaggggagacgggatggggcgtgatgttcggccgcaagaccatcgaggtcagtcttcgcatccccttcagtgtagtgatatctcacactgatgccgagcaaaacccatccatcaggacccgactaggatggtcctccccttgcactttcacgccaacaacctgacgcccaaagtcctcaagatgatttacaacaacctcgacaagttgtccgtgaaagacctccctccggtcttgccttccccgcacgacgatggccaggagacgacagaagaaaaggacgacgacgagacatcccaagacaccttggacaccaagaccatctatatttcgatcgtcactccagattcgtccgtcgtatactacaagttgacccaaggcatcaagaagcccgacgacattcccgacgagtagacttttcgttctcgggggaagtcggcgttcatttcggtacgacgggcgctatgctaggattgtggtcgtagctcgacaccggccagggcaaatcgatcgttgtcgttacgtgtcgtcaagaggtcgtcactcgctcaaccggagcgttatcatcgaggtcatcaatgcgccatcgaggcgattcccgagcttttcgttcccggtgccctctcaaagggcagcaggaccgcgcagatggcggtcgagccgaacacgactgccgagcagatcaatggcagggattgctgcctggcgaggagactccccgcaaggataggcgcggcgataccggctctacaagtggtaacggctattatcagctcctttcttttgaagagaccactgtaggcgaggatgctccgacttacatccggctcgacgctgcgagaaatccgactgctgtacctctcaatgatgtctattcataatgaaggttgcttctgttagtcgtccagtcgacgagatgcgacgagcgatacacctactgtgaacgtttccggtgtcatgccatctgcgacgatcgtcgacaagacgcgatcagcgatctctggtatccgacccaggtcaatggcatcgcactcacacaagatggcatacatcgtaacagcagcgttggatagcatgcaggtcgagaccacctgggcccacttggaagtggtctgactgaacgtaaaggtcatgcacgccgtcaagacggtcgacaatgccagacttttccggcgtcccagctttgtctcgatgagccagccaccgaacttgtcacgcgcttgtgaatcagcctttgacccatgaaacccgatacaattctaccgtggactcactattgagccaggaataccggcgattgagaacctggttggacgcgagcccaagtcagacatgctcgactgtacttgcacgtctcgtagacttaccaaacgtattccaagagcgcgtcgtagagaccttcaccagcatctcgtgaacgctgttccagtacagtcggcagccagacgttgaacctataaggagagggttgttttcacgatcagttctccgtcaacgaccgtttgatcaagccccagatcgcactcacatgccatatgcgagagccatggacatccagatgtaaatcatcaaggccatcgtccttcgccattgcgggccgaaaagcactctaaaacgagccgaccacgcgtcgagcccggccatcaacctctctttgggagtggcataaccctctttcctagcgagatcttgggctccctcatcgtccgactcgagatcgtcttcgtccgcttcttcgatactttcgcgtttgatcccatccactgaatgtcgtacctgcgtcgacgtccggccaccatcggatccgtcccaatcgggtgcgccgagctcttcgctcggcgtaaagaatgggtttctagactttctcgacggcgtcccgacgttcagagacgaggaaagtttgtgaccgtacaaaggcgtgcccagcgtctctatccgtgcgctactcgtcatcctcgaatgcggcggaggggtttgcgtgatctcgatcgggcgtctttccatgggaggcgcttcgaatgggattgtgggaagagcggcggacaatctcttgagggatccttgacccccgaccgagggcgtaaactcgggcatattgttgaaatgcgcaatcttgctcaagattttggcgcattcatctttccgacgggtggccaccaggtatcggggtgactcgtgcagcctgaacatggccgagcgggcgatgaccatggcaaagtcctggtgcgagatagacggcggaaagaacagatccctgctcccgtcagtgaaacatggccacgacggggagcacacgagagaaggactcaccagtaatgccaagacgaacagcatctttttccacccatcgttggcaccgctggcgatgtcgcaaccctcggcttggttgcacgaatgtttgggtaggacgagcagtccgatgacgctggacatcacggctccaaaggcgaaaaaggtcgacaagctagtcaagaggtactgtttgctctggggaagattctctgttgttgttccgaagtctcacatcaataatgaccgtatcagtaccggtctcgtcgacttaccgagaaagagcgtcccatcgctatcgagccgtgtaaaaagagtcatctactgagcgtcacattcttccctgcccttgttcctcggccgcggcgctcgctccgtggactcacgtgggcatagatccccctacggcagtccctacggcaaacatccagaagcataatgatttgaagctagatgaatacgatgcgccgaggttgaacacgcccgtgaggaggatggtgacatggtaaggcaacgctcgaccggtggtatcggcgatactgccccacgaataagccccgactgccatacccgcctggtcggagaatcaacacgatcggtttggggtcaggttgtataatcgaacgagagttgcgagggggacgtaccatagcggaagcagagaggagagaggtatcggtcgagctgagatcaaaatggatctgtactcgaggcaggatgaccgcgatgcactgtgatgaacgacgggtgaattcttccgaagatgatcaccctgatactggtcgtcaaatctctcggactgacctgtaatgtcgcattgtccgagagccatccgagcccacacaggacgagcaagcgagtgtggtatttaccttcagatccttcgggttagctctcgatatcgctcgtccccggcagacgagcgtcgatacgcaccaaatcctatagcgttcagatcatcttccagcagctctgcgtgatcaactgacacgttgtcacgtctcttgagcagggtctgttgagcttcgacccccccgttgagagagaccgctcgctgatggtgtggtagggaagcggtcgacatggtccagcggagtgcagggagagagattgcgggggatgatatgactctgagaccatgcgagtgagttgatgtaatctgaagagcggtcagtgttgtctgattgcacagcagtagtaagtgcacgcaacaatgatataatgacagactgaccgttgaagccaattgattctgtactgcgacgtttggatgttgtagatctagatatatttgcttccgaaggctcaacaagatatattacgagagatgaaataacgtcatatttaggtcatcattatgtcaacctcctcctctttgctcatcacgtgatttacttatttccgactttggatgacctttgaaccaccaccggggctgagcgagatttagggaaatgatggtcgtgtaaaggtggaaaatcatacttactacgactgaacttactactgcaggttgcacacacaaggtgcaaggagtcatcttgaatccacctctcttacactcatcttccggagctatattcgatcgaacgagatcgcatcaccatggcaccttctaccacgggagacgctcgtttcgctcggctagagacggatccccggttcaggcgacccaagaagaagcaactcaaggtcgagattgacgatcgtttcaaggaaatcatccagggtgacgatttcgcgcaagagactcgtggcaagggggcgcgaaagagtggtaagcaccttcagttcgggaatcggtgtatctttccatgcagaccactgaagagagtccttgggcacctgcatcggggcatgacagacaagtacggtcgacctctggcgaaaactcatcatgccgaccaattgaagcagttttatcgccttcgctctccttctccatccgccgagggggaagacaaggacggccaattcgtcgactatgctcgtggtgaaggacttttggaatcttctggatcagaggaagaggatgacgaccaagaagaggaggaagactccgacgaggaagaggtggtagagatgggcgcgttcaagaaaaaggccatccctggtcaagtcgccgaggagacggatgatgacgaggagagcgacgacgaggacaacttcaacgtcgacctgtccgagggtagcgatgatgagcagtcccctgtcgcacctgcacctgccgagactgaagctcaatccgcctttcccgacgaacaagaccaacccgaagcagaggaagacgagattattgatttcactcgacgattcgccgtcgtcaacatggattgggacaatatgcgcgctatcgacctctacaccgtcttttcctcaatgttgcagtccgctcaacaaccccaggggtcttcccgtcgtcgagcggatcccgacgctccggtccctacgggcaagttgttgaaagtgaccgtctacccgagcgagtttggaaaggaaaggatggccaaagaggaagccgaaggtcctgcagccgatgtctttaccgcccccgcgagaaccgagggacataggggtaagggcaaaggcaagcagatcgagctccgaccgggtaactctcgacccaaggctggacgtcgtcagcaggtcgtcgaggagagcgatctcgacgaggaagaggatgacgacgaggaggatttcgatgaggatctcagcgagggcgagcttgaagacctcgaggacgaggacgaggacgaggacgacatgcagctcggatccgacgaggatgaaggcttgtcggaagcggacggtagcgtcgacgatgtccttggacgggttcgatacgattccgagcccgaggatgacgagtccatcggcggggacggcgagatcgacatggacaagttgagaaactaccagctcgagcgacttcggtgagtgcttgtcgggggtatcggcgtgcgtcgcaggaaatctcatacttactcgacactcgcgtcgaccgtcaaacagatactattacgccattgtcgagttttcagacgtcagcgcggccacctacatctaccgagaggtgaacgggaccgagtttgagaggacagccaacgtctttgacatcagctttgtacccgatgacatggagtttgacgaagattaccacgaggttgcgacagaggaggccaagggatacaaaggcaacgactttgtcactgatgtgagtgcaggtggcgactcttgaaaatttcaacaacgctgacctctcgtttcgacctcgccgtccaggcgctgcgacactcgaatgtcaaattgacttgggatcaggacgacccgaatcgaaccaaggtcctgcggaggacactgacccgggccgagatcgaggaggatgatttcaaagcgtatctcgctagttccagcgaggatgaggaagaagacgtcgtggcgaaagagggcgaagatatcgaggatgccaaagccaaacgacgcaaggccaaggcgaacgcagccaagcttcgcgagatgctcctcaagggaggtgatgaggacgaggacgtctggggcaagggctcccgagggctgcccgatatgcaggattcggaggacaagaccaaccgcgacatggagatcacattcaaggcgggtctttccggagccatcgggaaagatgacgacttggaaaacctcacgacgctcgaaaagtatcaacgacgtatgaaggagaagaaggatcgaaagaaggagaagcgagagcttaaagcgggtagccgggcggacgacaatgccgaaaaggtgcctgccgccgaggacgactttttcggaggtgaagaggaagaggtcgtccaggcggacaagaagggcaagaagggaacctcgacaaaacgagtcgaagaagggccgaaaccggtcaaggctaagcagaccaaagacctctcggctagtctcgcatccgccgtcgacgaggccaaacacttttcgatgtccgacatcgtcaaggcggaaaagtcagagaacaagaagaagcgcaagcgatcgagaaaggacaagaccgagagggaggtcgaactgggtgacgagtcgttcaaggtggatgtcaaggatgacaggttcaaggctcttttcgaggagcccgagtttgctatcgatccttcgaaccctcagtgagtacaagtccggacatgttggcattggcgcatctctgagctcttccgcatcttgaatagctttatcaagaccaagaacatgtccgagttgctctcagagggaacccgccgtcggaagagcaagaccagcgcgcctgctgagcctctggccccggtccgcaaggcagactcggagatcaagggccagtcactgcaggatctggttgccaaggtcaaggggtcagctggcggggtcgtagagaacgcagcccaaggtcccaagaggaagcgtagaaggcattagatcacgcacgaccttgtaattgacattgtatttgcgccgaatcgcatttcacgtgtagacgcgatcgcatgacgaatctccgatcgaccgagagggagagagagcgttcaacagacaagcagatatcatgctattgatctgatgatcgagctacagaggatgatcgcaaactacagccttaaccattccatcaccacatagctcgaaaactcgcgtgatagctgagagtgactaagttggtttacgcagtaacatgatcgatcgaagtagccagacaatacaagaagctcatcgcgagtttgaggacactgtgcaagaatggttggactcgatgcaactggatacgcgaacagaagccatcgtctcagagatgcaaagcctggctgcgatctacccagactcgtgcaagatgatcataccacctacagagacggcggctcgttgcagtgtacccgaggcaggacagcgcatgcgatatgaactatttctgccgctctttgaccaatacgactgggaagcattgctcgcgagcttgtctggagcacggtccacgtccggagatataccaatagtacaacttctcgtcacagtgagtatgtggaaacgggagagacggaaaagcatctagggcaggggacatgctgaattgaagcccacatagctaagcccagaatacccggaatcatcgccgccacagtcagtgcttgcccgcccgctcacgatgcaacggagagtctcacacgtccccgttacaggcttcaattgggtgggaagtatattggcaagtaagcgtcgcaattcaggaggtgcgtagatttgaccggatctgatacttctgtcccagttatgcaatagatatcgctctctgtaagggcattacaccaggactggaaggttcatgaaattcagctgacgtcaatggatagtcggcgaggtgaccaaagtcttcttgagccaaaacggaccgtctttctcgcccgatgccccttgcgtattcgacggtacagagcacgtcttagcaagagtcaaggaatggtatacccggcaaagcctggaagatgctagcggggaggaggcgcgcaacctcgagcggcaagagagaatggccacaagtacgaacccgaccgaagccaatgacgggcatgctatggaatcaagacaggcgactgtcagcgggcgaatctctcctcaggccactgtgccgagcaacatgtaagccatcctagccatgtccgacatcaagacttgagcaactgacaccgttcagcatctgtagggttatccacagtagcgagccaatcacggtgtaagtgagactggacgcttcagggcatcttagtctagctgattgaatggagtcaatatggctcgtagttcccgttctgtattcatcggacacgctatcgccatcaccgatccagcgcaggtcgcaccaatcttggagcacttgatgaacgacaaatccaggaagttggcaaaagcgacccacccgttgattttcgcataccgagtcgtgcggaaagctgaagcgggtcatgattctgtaatcattgctggtgagtaaactctgcatcattatacgcagacacagagtctgaagcaagattggcttccagataacgatgacgacggggaatcggcagctggcggtcgcttagctcatttgctacagattctagagctagagagtaagcctggagagaaccgcgattgaacaagcccgagctcacacagtggccgctgcgctcagatatcctggtgatcgtcagtcgttgggtaagcatgctcggtcacgcttatgagaagagcatggggcctgactgacaaattactcccgacacagtacggagggtaagctgtagcgaaggaaccgggtgatttcgccttgccgcctgacttgaccttgaatcccgcagaactcttctcggtgccgagcgtttcaagttgataaaccaagctgcgaaggatgcactcgaacttggaggattcctcggccatacaggcacgaacaagaagtctaagtaacgtgttattgacgatattgtatagcatagcatcatgacatgacgaaggaccattcgataggcgtagccgatataagcaacaggagctactaacgacgtgctcgacctttccctgctccctttccagcacccttgccgcccttcttgctgggtcttgcgttcttcgcccgtctctgttgtgcgacaagtggcatgtcagttcgcgcagattttgattggacacccagatgctttcgacttacctgttcctgaaccttcctgtctcgtcggatagcattgacgtctcgcaattccgaccgagctttctgtccagcatagccagtcttgacgccgccggcaggagcgccctcggcctctgcggctttctcggcctttttcttctggttgtacaccttcttctcgtatgtcgtggacttggcatccaatggtttcgcttcgtatgtattgttgtggcggtacttgttcatgccagtagagccttgtcctcgagcatggtcgccctctgcgtctccgaccttgggaatgatgacacgcttcttggccttccactcgtcgaatcgaccgcttcggaaagatgccgggagtcgagctccgctctccgtcttgaccagctttttgttgtcagatccggttccatcaccttgaacaaacttcttcttctttcgatcccaagtcaactggctcgcccgctgtgtccgcgcgacaataccgtcgtcgccagccagatcgaaagtagcgttccgcgcttgctctacgaaagactgtccatccttcaacgagtaactgagtatgtttgcggtagcatgtcagtcctaacgaccaaagcggcctgaagcgcgggagtggactcaccctctgtcggccgcagctccggattgatagtgggacatatagaactggtcatccttgaagtccgtcgccgctggcttgactttctcaaagacggtctggaagatcgcgctatcaataccgggcttcgcaacagcatcattcggtgtactcacctctagctgctcttcgtctgcctcggacatgtctacgtctacgtcactgtcgacctggtcgaggaccggagcgtctgccacatgcggtacccgactctcccccaaggcagactctcccttgtcgccttcgatctgcgctttccgcctcttgacgacctggtcgagggtcttacgtcgtcccttcatgatctcggccgcgaccgaagatttacccctggtacccatctcaaagacagtttcggccggttggaaattggtgacccggctcaggaaagcctttctagcggctgccatgtctgccgagtcgggattactgtcgttcttgtatctctcaacagcgagctgctcataaatcggatggaccttgttctccgccgtcaaactaccttgaagcggccaagacggatccttgaccattgcttttgatcgacggtaactctcctgactggcctttccctgactcctctcgtacatagcctgacccttcctcacgacctccttgaggattttgaggttgggtgcgcgctccatcagcgttgttgagacgtgctcgttttccgtgtcaagcgagtctcgaggaagaggtcctagtacgaggcccgaggtgtattctgacaggtcgccgtggaagccggcaggcgataccaaaggccgaccgaggaagagttgtagatcaagcaagtacggtagctccgcagtcgtcacgaaggaccatgcccaacccttccgccccgctcgagccgttcgtccgacacgatggacgaacaccctcgaacccgtggggaagtcgtagttgatgacgttctccatgatgggaatgtcgataccacgtgctgcaacgtccgtgacgaccaaaaggttcgtgtagcctcgtcggaaactgtccatctggaactttcgcgccgtctgatccagggaaccatagatgtgcgatgttgtgtagcctgccacttgcaacagagtggtcaaatactcgacatgatgtttcgtagcggcaaaaatgatcgcttgatgcgaagccatgatcctgcggaccgagtgctccttgctcctcttgaaacgttgcttcgaggcctcgccatcttcatcctcgtcctcctcctgcaagcggctcacaccctgctggtcgacgggcaccttgatgacctcttttaggagactcaggagggcagcttccttgtcggcaggtttgacggaaaagaatgccatacgaaggtccgtgctgattttgctctcggcgtcgagacgaatgagcttggggttggtaaggcccgccctggcgaactccacgagcgatttaggcagggtcgccgagaacagcagggtctgtcgggaaggtggcaagcggtgcaggatttcgtgtagttgcacttcgaatcccatctcgaacaatcgatcggcctcgtcgaacacgacgtactcgatcgagcgcaggtcgaggttcatctctacgatcaaatgcaagagacgtccgggcgtggcgataatcacgtctgggttgttggcgatcatagagaattgctcgtccagaccttctcctccgacgacaagaccccatcgcagatcttgagttttcgaaagcgcatcgcccccttcgtccgactcttcgtcgtctcctgcgtgtcgtgaagctttggactgtttgaagcccctggccatctccttcccgaccctcaaaatctgaaccgccaactctcgtccaggacacaagatgagggctcgagctccaaacttggaggagtgacgagcgccgaagcgttgcagtagcgggatcatgtaggcgagggtctttcctgaacctgttcgagccataccgaccagatcccgagggggagaggcgatagccgagggaatggctgcacgttggatcggagtaggagtcttgtatcctcgctgcagcaaagatttgagaagaggtggtgcaaggcctgattgtagcggggcgtacgagaggatgcagctcagcggattggccgccggattgaaaagctgaatgcgactgaaagctcacccatgctctgccaacttccgcctccggtaaggcccttcgtctccttctctttgcccttccctttggcggcatgagcttttacagcggtcatgccgtctgccttgagtttggagcccatcatgctcgcaatctcagcttcctcttcttccgtaccgtatccgtcatctctgctagtctgcttgcccggtcctgaacctcctacgagcatcgacgagatatctcttgctccggcctcgtcctcgtccgattccatacctcctcgaccactcccccgaacaatctcgtaatcatcatcgtcctcctcttgcataaagtcgagcttgcgtttgccacccgcagcagcgggtttagctctgtccgggcctcgatttgttcttggtgccattttcaagtgacgaaaagtgcgtgatacttttgataaagtgtacgcgttgtgacgagagtgaacgttaagggtgttgcactttgggctgtgtgacatggtttcgaaaatgtctgacctactttgaccttgggttatcggaagtgttgtatttgcctgaatcacgtgataaaattcatgatgttgacattgtgtcacctttctcagtttgattccgatctatttgattccgtaaactagcaaatccctccgcacatcgatcgagcgttcatggtcttctgaacaagctgaccacgatcgctggctcgctggttcgatcgatactttggacgatatcatttgatagtaacaacgtcggatccatatctcttttcccttcatatcccgctcgatcccgccactacgggcccctgaaccatgagcgaagtaagtgcgagggtaccgcgtcagccgccgctcgagttaaggtcgacctcttgtgtcacacagaacgctgctaatcggatccagtctgctggcaaagggtttcaagcgactcctactcgagtctcgtcaaacttgagtcctctctcagccttcgctccaggatacccaacaggaggagatgcgacgagctcgtcttcaaagcgtagccttgcccacgaagagacgccaaccaagcggatcaaagtgcgaccaccgcccatcggtctgcaatttccccatgacaagcgtgaaagcttcagaccgctcggtttcgatatcactgggggacctatcgccagtacttcgacacctcgcaagtcttataagctagcgcagcctccgataccagtcaaatcggaacacgagtccggctcgaaccccaaacctaaacgcctcgcccttggcggtatcgtcccagatcagctccgagttccattcgaactcagtaccgcagccgagtcggaggatccgttgtacggcagcgaggacgaagcggaacggaggcctttccatccacggatgagcgagtgagtcgggctcttctcgctatcgactatacctttggcacgccgaagacgtgttccttctttttcaacgacacgcagtctgccttccttgtcgctccaattctccagactagcggccaatcaaaagtcatccacgatgttattctgtgccaacgtcctgcaggacaggtctagcaggtcctcaccatcagcccaacggggaggaaccttgacggtatcaagcaagacgcctgatgtcagctcggcgaacttttccctgcagattcttgcagtggcgtcatactacggtccaaatccaatcttcacggctcggatcaagaccaagaagaccgctcacttcgaccaagtatacgtcgtcttctcaagtgatgatggcatacgcgacaagacggattcggccactccagcttccatcgcaacgactctgcctcaaggtgaaactcggactatcctggcgaacttgtggaatccagtccaaaagctactgcttcacgagcgcgaagtctggctttgttcgaggttcgttattactgttggcatgcagcacagcacccgccaatgaccagcatggcggagcgagcatcaaatctatacacatgccttactagttccacccccgctatacatctttcttagcgcgagtatcacgctgaggatcatgacaaccagcccaaagatggtacaggcagctgcacacagctttcttcgtccgtaccacggttcagacaatagccgataatagcaagccgcgggaaactgtacaataagaaggtaagaccattgaaggttagggcatgcggagcaccatcgacttgccaaaaaggcaagagcggttgcactcagaccgccagtcagctccaatactgagtttgaaaggcagacataagtatgctgcgttctgacagagctcaggtacggcactgaccgattccaagatcgcatgtagtcattgagacaagcattgccgaaaataccagacccgtggtcaccaaccagtgtcgagtgtaattgaacggccgctctagaagattttcgatgacctgagtaaccggattcgatccatatgagctcaaattagcgctggcgagactgaaacgtacctctctgcaaacgaaaacttccagtggcagtgtggtgaacatgttcaaaccaaagcacagcctagcaatgttgatcacgatatcgtcctacgaaattgggaggccatgcagaataaactagctgcatgtcgttcagtgagaaggaccgacataccttagggaaattgttcaagatgttaccctatcacaagaggtgattcttcagcgattgaacaagctgcgaggcacggaatcatctcacctgcgtcttatctgtgaaagcgagataacccgaaattgacaagatcaagcaacagaccaagctcgtcaatgtggagatgtgagtcacagcagagaatctagagacgttgttcggatgtcagtgccggtgaagttgcatccagtgtgcgagctcggctattgaggaggagacgcaccggtcgagagtgggcctttcgagacttccatagatgagcattgaattgtgatgacacacatactaaaagatctcaccgcctgttagttcaaactagtaaaaggaatgcgaaccatgctgacccaccgcgaaactaatgactccgatggcttcgaagaccttaggcccgagaacggtgaacacgttgtctctggaacctctcagcccgggttccacgccaggacctttgatgactacagacagaacgatgacaagcatcgacagaacagctagttccatgctgcagtgtcagcagtggttcgagcgggcgcacgtgcaggtcggacgatctctcacctagacttgacgccttggctaattttgcaatgtcccggtacagcgaaagcgggtatgctacaccgccaatagctaaggcgatgataaactgtctgttgacaagcatggctcctaacgcggtctcctgcatggatggggagaggagcgaagccagaacatgcggtatggtgtcacctagaatggtagcaagggcgttggcatctgtttttgcggacaaggaaacaaagtcccggtctactcaccaatgataactcctagagagtcgcaagcaggactcagcacaccttcgataccctgacaggatccaagatgtctcaccacatgctgccatgcctccacaagcaaatacgaattggaaactggagacagcgaactggcctagccgaccaaagcagtgttccataatctgattacgcaggcctgaatattaggtcgagttccatgtaacagaaatgaacctacacccatatatgacgtcgctccggacagtttggcgttgataacaatcaaacgtattgtcctattttcgatggggttaaccaggaccaaaggcggtcgcgattcggccccttgactgaccaatctgtcactccgcaaagtaagatgagcagcattattcccgtgaagaacccagcttcagatatcgctaaaggtaaaccttcataaagggacagtgcgctttagctgtttacgtatgcaacgacaacgcataacttgacgacaaagccggacataccgattattccagcgcctatgatactattcgacatgttggcaatgccggctactattccgcttcttcctagctccggtatgaccccctcccgctgtgagacttggaatcgaggagtctgtgcatggtgatccgtagttccgacgggtcgtaaaagtggcaactccacttctgctgcctcgcgcgtgagagctgggctcatgccggtcgacttgcgttccagtacgatcacaaactagcagtggatgtacaatgcttcaagcttcttgggaagaaatgtcatgcgaccttcggcatttcagctggtatcgataaatcaagtagagtattagtgaaggcggtagaagggaatgtgaacgtggctgatcgatatgcgtgtagcctagtccgtgtgacgcagtgactgtgatttccacagcttttgtcccaatagaaatttcgctagaatcttgatctgccccgaagtctcgtcgttgcagtcagaatcatcacttgggcgcccatcaggtcgatcacgccgctgattctcgacgtgtgcccatccaagggaggacaattcgattatctacacgtgacccgcaatatgggcttggatttgagctaattagccacgtcatctgcaatgttcgctggtatcaatcgcagctcgagctgtggggccgtgagaaacagtcactcagatgaggacgcgagacgcgtccccccccccacgtcaacatcaacaatcgctcccatagcaggtggtagtcggactggcccagccttgatcccttctcgctctcatacctagcaggctcacatcaccggacatcctgtgcgtaaggattattaccaggctatccccagtccctcctttcatcccaacaaacgatcatccgccccttcgcaacgaaggttcatcacagctagttcgtgagcatttcctaccggagcataggacgcgcctaatactagatttgagcagagcaatcgcgatgcccaaagctgtcgcagagaaacgagctggaggcaaggcgaagaaggatcccaatgctccgaagaggtctgtgtatctctccctcgtgattctgctctctcactgacgcatatcggtgatcgacgcagagcactatccgcattcatgttctattctaccgcccaacgcgagaatgttaagaagaataatccaggcatctcatttggtatgacttgacacggacggctgtcaccatcatactgactcacactttgttgcatactcttttaggagagatcgggaaacagctgggccagcaatggagggagatgagccctcaggaaaaagccgtcagttgcaatttcgctcatcggcttgatacacggttcaagcgctgatatgctatatgcgagaagccttacgagaaacaagcagctgcagacaaggaacgagctgagcgagaaaagaaagtttacgaaggcggcgctccagtcaagaagcccgcttcgaagaaagcggctgctccgtacgttcccccatacatctctcctctgagtaccgcttgccactgacttttcaggcttcgtagtgtcccggatgacgaagacgatgacgaggatgacgaatagaagtcatctgccgtcaacgaccccgacgccagtcttatatcgctgcgcctactactcgccgctatccaattcgttttcgacccctcttttgatttgccttattttctttccgttcctattgtctctcattgtctatgaagtctccgttctaatgaacattctctcggttggtatcgaggtcaatgcggaagatccctgccattgataaggccagactcggcgataacaattacttggacaggcgtaagcaagcagagtgctcgcaccgacagatgtacccggagctgccaactacagctctggctttgaaaagtcacgagcgaaacttctggtatgagattcccacgattccaggtgctagacaacgagtcgaaagcaatgcggaatgacctgtttccgtggcagcgactactgacgcgattccgggggacaatggaatccacgtgaacttactggcgaaacgcccttagcatgttaacctccgttctgcatgctcactacaagttgcagcagtaccccgacatgccaagagaaccacgtggttatttcgcaagaagcgctagtaggtgatgcctgagtgatgatggaaacagcaaggggttacacaaggcattttgataccgtatgtacgtagcagctttgcaaccacgaggcggaaaccccatcaccactagtctggatgatgtcataacgtgccagcagccagcagcatcctccgtctaagtagcaaattgcaaagcgtatatgcgattacaaggttcgcatacggctgtacggtgcgtaaggagcgagcaaagttggtgtggtcgtgacgtcagcttgaggattcgagttatggcacggacaagcgaaaccaggacttcgcctggtcaatcattcgctacagactgccactctgacacacgccctggcagcacaactgtacagcagcagatcatcggccgccagggcgggtggggggggaggtgtccggggttgattgaggagatgtcgatttcgacgccgcttggcggggctcgctatggggcaggatcgaaggaagagaggtccgtatcactgtgctgcacgtcagtccgccataccggatcgacgacttttcactgggcgatgtcgttcaaagttgttccagtttgtcaattgcaagtggttcggccacctctttgaaccggcgtgccggatgatcatttcggaaacaaaatcgattggaatggggaaatgaaatatacatccggcgacgtcgggatgacgattcatttgcttccggtcctcatcgacatcgctattaagcaggctatggtaggtcctatcggcacaatgggttacgccggagttcgaaagactcttgcatgactagctgactaggaccatgtgagtactcgaggtagaagaaaccagcggcgagtgggcctcttgtttgcaaacccggtcggcatacggcacatccggtccagagttgagccggaaatgcatttaccgcgagcgagatccatcaagatttgacgctgcaattcgatcccatttcctgtcacgagcctattctcctacaatcatcttgcaacttctccgcatcatgactcgaagtcgtcaagaagatgactgactgcatggccatgccacgacgagacggaagggaaattcattttctcatcagacatccattgacacgtcacgtcactaccccgtcgaccttgtaattatttgatattcatgttcaacctcgaacaaggattgtcgattgtcgacctcgttcccgatatgatgagcatcatcgtcatcatcaaatacatcatcgtcagccagactcgaagctaattaaaaagccttgcacgacgtactagtcgacttggtcatcatggcaggcgtgaataaacgtccggtcgccccggcttccgctgcacctccgctacctccgggcccacagccaacctcgcacgagcaagcccaaatcaatgcggcgtggacacaatactatgtgagatgaccgcatgaccgcaagattattcgagagatcgcaagagaagaggattgctgatatcatgcgatccaaaattcaggcctctcagactagcgtttcggccacgccatcgacgcccgcaaactctcaagccaatgcggcgcagtatgcaaactacgggtatggtgccggtgcacctatggtcaacatggcttcgaccccggcgagcgctacgtttccaccttctgccggaatgcaacaggcatatcctgcacaatacatggtccctcaacaacaaccttacgctggatcacccgccggatacatgcctcagcaaccccaggtcatgcagtacccccatcatcagaaccagatgtatgctcagccgcaacctcagatgatgcccatgcagccggtcatggcgatgggacccgctcagccccaggggatgatgatgccgcaacaacagcctcaacaatggggtcaacctcaaggacatcctcagcagcctcaagtgagaccgggcgggttccgtccgagacccggccctggtcaggggcagggttcaggaggacctcaggggccgagacctggatttgcagggccgatgaacccgggaggtggcttagggatcgcccaaccgatggcccagcctcaacaaccgccgaatcagccggtggctggtgcgtcccaacctggtcctcaacctcagaacttccggcctactccaggtggtggtcattcttccctaccgcgagctccttcggggattccgaccaaccccacgctgaggaatcctcgaccggcacatccttcgcttcctgctgggcccgtatcgggtccatcccatcatcacccgcaacaacaaggacctccggcaaaacgaccccggacggacggaccatcctctgcctattcacccacgccttccatgcgttcggctggacctggcctggggccttccggaccaggagttgcgggacctcgggatttcggagcgaggaggcagcacgatgacgatcgatatcgagatcggagggactttgaccgggatcgagatcgggatcgggagcgggatagagaccggttcgagcggaggagcgatttcggcgggtcgcaggatggtgggacaggaggatatcgttctggataccctgtcggcggaggtggtcgtggacgtggtggtcggggcggtctgatgcctagagatagaagggacgggcccggtgcgagcggtagtggtggttcgatcgctggatcgtcggactcgaggttcggaggaccaagcggtagtggcatcgtcaccggtggtcgtggaggtctacgcggccgtggtgtaggtcccgggagaggcggcgcgatcgcgggttcgaggtttgtcgccggaaacggtgtagccggggcacccaaaggacccagcggacgaggcaccgggatccgagggagaggtggcaacttgtctactcgtgcaggagcgcgtgtcgtaggaacgcgtccggtccctgcaggcaaagccagcggcaaggacacgtctggcaaggcagccgtggtagataccgagcgggaaaaggtcgccaaggaggaggcgaggaagcggaccttgaccgactttaggatcgtcggactggagatcaagtcattgggttggaagtggggtgtcgttcgacctgaaatcgacgaagagggtgatagtgatgacgatgacgatgacggcgaggaggaggcagaggaggatgtggcgggcgatgttcaggaaatggacggaaaggaaggagaagagcttcaggacgagacctctgaagaggccgcggtcgaacgcgacgtcaaggtagagccagctagcgcttctgaagtcgagatcgcggtcaaggtcgaacaagtctctgggaacggggctctgaaggagactcggcccgaggttacgccggctaccctcctcgatgatgaggaactggcgacgaacgaggcgaaagacaagcctagcgagagccaggactcggaggtcatcgtcaaggcagaacaggcggagcgcgtagatggcgaggacaaggcggctgctgtcgcaagttcgacgctggagggcaagcgaggtgaaaagcgaaaggctaaaatgagcagtcccgatgcaggtttgtcacccattccttccgcttcatcaacctgttgtgtgtttacttatcgagaaatccgtgtcatgactacgttttccttctttcttcggcaattactatgatgcgctctcgcatggcattttctttttttttgcgccccatctccccaccgaaccccatcctcattgtcccttgctggtatagatgatgacgcactcatcatgtcgaagaaacgcacgactcacggaccggtcattcgcaaggagactgtcgcgctgtcaccggaaaagaaccggtttaggatttactttgccagtcctgttgaagacgccgatggtccgagtctcaaggcgctgcatgcgatggaaaccgtcgaagaggtcaaccccgacgagggggaggaggaagagcatgatgacggcgaagaacatgaggaagagggtcacgagcaagatggtgacgaggaggaagcgggccaaggcgacgacgagggacaggaggagttttacgaggctcaaggtgaagatacgggtgagactcgggaagccgagcaagacggtcaacaggaaggcgcatctgccgagaccgaggtgcacgacgagtcaggcccggctgacggggacgagggcgatatgagcggggtcgtggaggaggaagaacatgcagaggtcgagaagcccgaggacgtcgacccagcgcagcctgcagaacctgctgtgaaaaccgctcagattgccgaggcgtcgcaggccgagacgacagagcaggatgtggcgatgcgagagccctctatccctcctcaaaccggacccgaatccttgatcgaggccaaacccgatgcatcggctgaaaaggctgtcaatgaaccggcccagaccgagaccgagaccgagaccgaaacgagtacagttgccgcgcccgcggacagcgcatcaaaacctactgaacccgttcccgagatccctgctggaccaccatctgcaaagcaatcgcgtcaaaagtcctctgcacctttggctcctcgcgagccttcgagccatcgattgaccgacgcccgattccgacgaagcccctctcttccggccacgtcgagtgacaccccccgaccagagtccaaccgactgtccatcctgtatgccaacggcaagcgccgaatctgcctcgattcggccattgtcgagagcgtcaagatccatcgaaaaaaggggagcatccaggtcattctcgatgctggcgcggtgaagcgcaagtgggagcaggacaagcaggtcgatcagatcgtaaaacgaatcaaagagaccgaggtcgtcgacgaagctcctccgactggcaaggaggacaagtctagcgaatctggagagcagagcaaggccgaaggcgaggggatcaagtcgactgacgaggacggggcaaaggagcccgtcaagtcggaagaatggagtctgaccaagggcatcctcgtgagttccgcatcgagccgtctaatgggtttcacgtcggctgactcgacgctgcccacttgcaggtcgaagcgctagacgaagaacacaacgtgtttggcccattgaatgccgagacgttggctcaaatctggacctcgatggacgtgtcggagcaagaggaagaatcgcctcctctccatcgattgctggacgagctacaaaagtccggagcgatcggttcggacaaggtcaattcggccgaggctgaccgagctgacggcgcggtggaagaagacgggaattcgggtgcggattcgctcaagttggaactgacggcgtacctcgacgtggagcgaccgttgaccgagcccaaatgggtcaagagcgggcacgtcgaggattggatcaagggtgcaaaccatcatcccatggcggcccgggcagggagaagttcggacgagccggatgatgccagctggaggaccaagttgaaggtcatcgaccccgatactgttagtgcaaagtcggtcaatataaaatgttggacatgcaagatgactgatgaccttccgccttgtccccgtttgttcatcgtagccccttacactggcgagcgtcttggagaactgggcgctggtatccaaggttgggagcttgaaagaccgacgtcggttcgccaacggtcatttgagcagcctcaacaacatggtccaaatcctgctccgtgccgtacgcggggaagagactgtccctctcagccgatcctctcggatccacttgcatggacctttgaagaacgccatctcacccaaggatttctattatacgaaacaatcccatacctcgctcgccgtcatggccattgtcaacctcgtcaaggattattcgtacgcgatgaaggagacgagggtcatcctggagaacaagatcggcaacatcatcaagtcgatgcccaacgatgtcgtctttagcgcaacggattcgctctacactgagtgggtgaatcaggaaccgagaggtggacctgctggcccgagaggggcatgaggaggagaggtaaacgagagtaagtgaacgtcgttctatgtagtacgaatctgtatatcattcgtaacgatagggttttggtcgggaaatggtcgtttcatgatacctattcatgtgcttggtacggggatgcaagtgacttttgcgtgacgacgcgtacatgtccttgagccacacgttcgtcttggtcaagtctgctgtcctgatgccctaccgagccgaatgcttcactttccgatgagtctgcgccatggccgtcgacatggccccatgttgggacaggacgaggttggcaagtgacgcgaggcatgatcttgacgttcgcagcgcgtgtttactgctcgatggaacggacgacgaggataaggatcaagtcgatgacagtgcatgtttcagagacactttgccttgtatctttcccccttgtggtgatggttgtgttacatctgatattgcatattgcatatcgccaccaggtcaggggtcgcgacctactctttacgcgcctgctaactttcgatcgcgtcgcgtgaattctcaactttcgtcgcgagacaaggctaggagcctagctaggagcaaggagccatctcgacctcgaacaccacccacgacaccacccactacgctctagtcttgtcggctgaatccatgcgcgccctatccctagttcaactcgatctacatataacctcgtcttgctgccataatcaagtcatcccaatacgagctcgtacccaatcgaaccggaagacaaggcgatcatcgccaagtagcgtcatcttgatcagtcgcgcctcgtaatctctcgtcttcaaagtgaattcgcgttcgcagctcacgattctacaggacgtgcccagctaaccaccaaatctgtttgcatcacagctcgtcatcgaatcttgccaagctcgcaacaacgagaaacagacctcgctataacagccgtccctcatcacctcgatctctccacctgatctcgacctcgcgtcgaccgtcaatcgaacgacgcgttacatctaatccgggatcggaaaacgtgggggcgatcacgatcaagatccccaaaatcccggacgtccagttcggtcatgtccaataaaccgctcttggatccgttccagactcccctgagtacgaacagccagctgcctgatgtcctagcgagtggatcggagggggtcagggaagagggtggacgcggacgcgagcgcgttcaaggtcgcgaggagggagtgacggtcgatacgactgggacgatctcgactgcgaccacgacgacgaccaggactttggactctcggctcgaactgggcgaacccatctcgctggaccgtccggccgttaaacggaccctcaacagacccgtcttgcccacccccacatcgtcttcctcttccacctccgactccaccctacctgcgagaaagaacccttcggatctcttcttttacacccaaccgactttgtccaccacgacacctcgaccctcgcctccccgtgggaccgcagagaacgggcacgacgatgacgacgacgaggacgaccgtcacgatcatgccgattccgactgtcgaacggacctcggtttagatcctcggtcaacaccatggggtcctggtgctctgacgagcgataccgggttgtctcatggatcgcctgcggatactgaactgaggacgcccggattggacagctcggtcttccctttgaggcgactaggcgttcgggcgggtatcgtccaccataggagacacggtgaggagggggacggggacgaggacgaggaagcggatgggccgcacgggcgagaggatgggaggaagaagggagggaacgtcgattggaagatgttccctccccgagggctagagaccccggcgccggcgccgggcaaccggacgatcaaggacctctcagccatcttcccctttgccctctctacccctcagaacacgggatccacgagacgaggttctgacaaagaggaaaaagagcttcaactggaaataccgcttcaacctcaacctctggggtctcaatcggaaacagaaccgctacccgagcgggagggtcaaggtcgatcgacggtctcttcccccgctctgcccctcggacccctatcgaccccgctagccatcggcggatcaccctcgacccggcttacccccgaggtggggtcctcgtcgatgagcatgagtacgggcaagaaacgcagaaggacgtcgccagaggagctgatggtactcgaagaggcttacgagaggaatcaacttccgacgagcgaggagaggtctaggctggccgggcagacggggatgagtgccagggcggtacagatctgggtcagttggacgtcacgtccggtatcgggttcattgtgctttacgctgacgtcccgatcgcaacgacgcgttgtctttgaccctttgtcttacagtttcaaaacaagcgtcagacggaaaagagaaaggccaaccaaaaagtcttccccaccttgatgctcgtccccctccgacctggatccgcatcggaaccttcgagcgagggtcagtcggaagagacttccagaccgttcttgttgcccacgggtaaacgatccgccgggtccaggtcgcctaccatgtctgggtaccagtatgtgccagcggggatttcgggagaaggtcaggcatcggcggtgagcaaggggaagcgtccggtcttgccaggagatcaggaagaggacacgttctttactagcggcaagaccgttgctaggatgtcagctttgcaggggaagggcaaggcggtcgatatgggcgataccgaggacgaccaggaacggggactggccggcgccgagaccgagaccgaattgtatcagggggatcacgaggttgatgagctggaagacgacgacgaagggatcacaaggggcagatcgagggatgctgtattgcccacctcggacattagatcgagcagcccagcgttgatcaggtcgagctcccctgtcgtcctcttgaaagagcgtcagcagctcaaacgccgggggtcttccgcggacgacaagaacaagaaggaacaagatgccaagagggaaaaactgatgctgttcccatcgagcagttcgatttcggtcgagctttctggagaaatcgttgcggccacccccacgcagacgagctcgaggtcggacgggacgcgcaaggctaagcgagcgagtcccgcgacagcgttgtcgacacccaagagccaagagtcgtcgagatccagcgcgctcaagaggaccgcctcggagaggatacctggaagcctgaagaggcagatcattgggatcgccgacatctccgccggggatcaattggatgccagtccttcggctccgttcagcgggagaaagtttgtcgtcacccagtcggtacctagcttttcggtgcgcagggacggtgcttttgctaaacccgtcagtccgcttgggaagcgaaagttttcccggttcagcaacggttaccccatccggtcagacttgcctactccgggcaagtcgtttggacggagtcagagcggaatcttggacgaaatgtgcagccgcaaggagctgccgttcttgcccagctcggctcggaaagagatgcctggaacgccttcggctgtagcatcgtccgagccggaagaccatgtcaaggtggaatccgagattatgctcagccaaagcaaaatggcaatggtgaccgacaattctttgctcgatctgctgccctcggatccaccttcaatgggcttgatcgacctcaactcggatgccgaagacgcgccattcgagggcgataccgatgtcgaggagacgcccaaaaagaagatgaggacgcgggatggatcgcacggctccgggcttcgacaattcgcctcgctcgattactttgccggttcgccttccaagcgcaagggtctgttgggtgacgagtccaggagactgagcggcctaggcaccgcccgaaggcgcttgttcgaggcgcaccttcagcaacaagcgcagcagcgagctagtctcaaggccaagaagcagtccagtagcaagaagaagaaaaaggcgcctgcgtctggtttgaaacgttcagagtcgagcagctcggcatcgatcgcattggccacgattgcggcgacgcctacgcgaaaacccctagttaactctcactcgatgccggatgtcgccctcgttacgtcggaaaaggtcaaccggcgagtgcgcgcgtcgtccaaggatggcaaggcggagcagcagacagatgaagaggctgcgcgattgttgcttggattgtttggtggaaggtcttgataatagatggatagtgctcaagtgaaagatgcattgatcctcctgtaaacgcataatgaacatgaacgtaatttggggtacaatcaaacattgcgctctagcacaaagtcgagggtggtccgggtcttttcggctggcaggaagtttgccgcgaccaacaggcaactccgaggtctggtatgcaggaggactactcgggtaccccaacgatctgaagacgcaaaattcagctaggagctcaagcttaagtgactgtactttatatcgcattgaactactacttagctactttgcgatcccatgcttcaagcggggctgattcacgatacagtgaggtcgagaaacagatactgcaagcgaacatagcacggtgttgcttctatccgagcctcgcttcggcatcatggcagatgatatgtcattacgagcacctggcttgttcttatacaatggaagtaacccctgattgaacccacgtgcgaaacctacttcacaccgccctctgttttccctgcttcatcgccttttgctctcgcttcgtctcgatcgctctctgctccatgtacgcagcccaacgtttggcctcttccccggcagccttcttcctcttcttgatgtctcgcgagagcgactcgaagtgatcgataatagcccgtctcatctgcgcgtctactgattgcgcggctcgcttgcccaattccgctctcggcctagctagaaccatatcggcaggctcctttgtgagcgtgcggcgcatttgcttgccgacacccctcatgggatgagcaaccgcgcccatcagaccagcaagtggctgtgccccaacgttcatgatacctcgaccgagccccttgaagaaacccaccgtaccctgttggccgataaacgagctcaattagccctcgcccggccgtcactggcgctaggtcgatcacaacttgcctcctgcttgacgccaagatacggatcgactgctagtgcggtgaacccgtcgtaaaatccgtagacgatactttcaccgccagcccgaaaaccactggcggcgtcccggactttggtacgcggtcgtcgatcttttgttccccaaatatgcggtgccgtttcgaatcctgtggaaccaattgagttatcagttgtttgtcaggtttgtcacgacatgctcgcctcaccctcagtgagcccgcaaaagacctcggcgcacacttttgaaggagttttggcgatcatccaaaggccatcatagggtcgagcgctgaatatcctgagaagaccttcgccgctgttgccatcaaggtgatagatcaaggtcaatcccatgtcatgtacggtcgcatgctcttgctcacagctcagtggtcgctctcacacacgccatagctccaccagacaacggatcggacgctggtatcgccagatctcgctccaccggtcctgttccgtgacatcaattgtcgactcctcggattgagcatggctcgagtcactcacgccatagtttaaggttatcggaagacagcttgccggccgagatcaagacctcggcagccaaggcactcagtcgtaaaaagtacttttgcgaccaccatacggcgacgcggccggtctcgatctcgcatctgacgggtcgagacatcagtgcagggtctatctctagttgtccccactactgacctcatattcaacaagggcaagtgggaatgcaaggcgtttgcaaactggctagctccatcctgtagtcgaagcggggtgactggatgaacgggccatgcgggacgcgaccgcattttcctcactcacttccgctctgatgtatgcgcccatctcgttcgcagctcggcttgcctcttccgacaaggcgtacttgattgccaaggataggttgtctgcattcaggttcttgtatttgatgctgcatagcatagatgcccgcgatcaggctgagtcgccacggccgcgctgggatctgcttacggttctggaccagcgcccctacgatggatcatcgcgcccctgtattggccgggcgtgagtgtttgttggtacaacggtagactacgattcgagaaagacgacgtcgccttgccagaaactctgatctccaaagaacggtactgtccaagcccgatgatcaccatctgagccaaaactttccggctcgattcagatcggcaccaaactcaccgacgatcgtcggtaggccgttctttagcgcaattgccatcgttcctgcgccaccatgtatgcatactgccgagacacggccctcggagaataaccagtcatgtgggacgtcgcctgcgatcaccatcgagacagggttaggacgacaattcctgcgccggtgatcacatctcggctcacccagcgcaaatacattgtctggcaaagttcgtccgcctaatctgctccaacccatcgagatcaacgctcgcacaccagactttgccacggcctcgagtagtatatctgaacaaacgcgatcagcttcaaggtcgtcccaacgccctgtcacaaccccgccatgctcaccggtcaaccggacgggatcctcgacgacgatactaccgaatccaatatagatcggagtcttgccacctttcagaaactctgctagatcattcggtggcgagtacgacttgctctcgaggaacaggaaccccgtgacgtcgatattttgtccccagtcacctggtttcgggatcaaggccgggctccagcagtatagaaacggaactcgcaaacgatctacggcggtagcccccgaggctgccgtcagcggtacgagcccgagtcgttttctgcgacagcgattaataccacgtccaagactgtgcgcagagaccagagatgattagtgctggcatatgaacatcgttggccgcccctgacacacccctgccacgtcaatccgtcggccagagcataggtcaagtagtttctgagcctttgtggggcatcactgtgtacgacatcgaccaggggttgggggaattctgttgtgggtgaccatggcatcgctgtcgggttgcaaagacgaatgataagactgaaacggcgagcccacctcggtctgactcactgaatgacatgatcaggggcacgccgagcgcttccgcaatgtgtacatgaccgaatgcaggaggattgctaacgatgacgtccacggcaaacggagtttgctttttggggcagggctggaaggtcgatcgataaaacccacgtagcatctagaagccggtaagtctcgccgtcaggtagactccctcactacatgggtccttggactcacttggttgaccattgcttgcttttttggaatatccctgttccgaatggccgatggaccggggaacaatcccgggtctaaaagtgtcacatcgggcaacgttaaccggccttgttcgataaccccggctgatgaaacgcacgcttgaccatgtacgacatcagctccttgggatctccacccacgccgaaaaactccaaattttcctccagaggcctctcttcccttgtcttcaatcctctcaagtgcaccgcctgttccagcacaaactcttcaaacacatcgtgtgtggcgatcctcacgacgtgttcatacgtcttgatcagatgcaacgccgcggcgaggtacggttggacgtctcctcgagaaccgacgatgaagatgacgatccgaagcgaaggtactcggagaggtctggccgggtcgacaccgtactcgaacacttccgaggcgtacgaggggggtgattcgggtgatactgaaccctcgactcgactggaaacgcaaggcgatgagcggaagccgccgagattcacattcggacgacgtgtcgctcacaattcgacggcgatctggccttctgcattgacctcagcctgagcatcgaggtggccatctgatattcgcaaaacttttgggtctggaggggcatcaatgtggataaggaagccgtcgtctcgtggctttaagaccctgccagccacccggcagactcacccccgacctcgtcgtctacacccccttgatcttcgatcgcatcttcgtacacactcgagtccttgtcatcgtctgacatctcatcgtcctcgcggaatccgccgtcaaacagctgtccagcctcgtcgtggcctcgatccccacctacgctcatcaaatgccttcctgatccagcgagcgagcccccatccgagacgatctggtcaccatcatcgtatgcgcgagcagactccatccgtgattgaatttgagcagatggcaccatgtttgtgcctgcgagttgttgcggtcggcttgaactagccatctggtggtcggtctcgaataatggattcaggtcatctacggtcggtcggggagctcgaggtgtgtccatcgcgttgcaggtgctatttaaattgtgcaaggcgtatctaggcagagcaggaaggatatatctttgccagcgcaggaccaggaacacgtcgtgatggttgctgagtgggtcgtattggagcacagcagcggtcgagcagtgatggagaagcgttcccttcggaatatcaagtctagtgaggcatatccgaaagatcccacgactgtccgaccggttcagggatccttggtctccgaagctaggctgtctccatggttgtgagcgggctgccttgcccaagggattcgtccgtatgactgatcgagtgggtctttaacgatgatacaacacgccgaaagccgttgccatgagggtcaactactagaagcggcaattggcctagtcgtctagtgagacgacaaagcccgagatcacgtaatcgactggagtcaggtcggaacacttcgacgagctgctagagtgacaattgcacatcgcgattctcagggatagacatgacgaccatgaacgcaatctcggtttgaatcgattgtcaagctgatggtgagacctgcagcgattcggcagcgataaagccaagagcatgcgtgtctttcatcgtgaaattccaatggtttcttttgcgcgagcgctgatcatgattgacatgccggcagggttaacagatgtgaaggcgaacattcgatctgtcaactaacctgtctctgccgatcacagcgtcgaattcacattgctgagcccacgcctttgactgggggctttccaccaggggctccttcttcaattctgaccgcaggatgactttccaccagtcacgtaatgtcgatgattgcaagcttgaatcgatcgccgggatcaggcgctgagccatctgcgacctcgtctctgtgaaaagggctggcacactcagcgttagtaaaggtatgtgacgatggaaatcacgcgagtctgcaaaggtgtgccagtgtagtattgcaggtcatagctgaccgctacgatgcttgtcgtcccatcgataggtcgtcctgtacgagtgtcctcaatattggaaaccgcccgctattcagatctcctggacagttctaccctgtctacctgtgatcgaagacgagaccctactggagcaagtgaggaaatacaagacatgggcgttgcggggaaactacgggcgcgatcccgcacgacccacctacgtcacggacgatggcctcttcgcagcggaactcgtgttacaagcggttcgagacgctgggcgatgcggttcttcgatcgtatctgttcgacgtaatggtagacagataccctcatttcacttcatcagccatggcagtgagtccgcgcgattcttctcgatgcgtagcaatcgctggttcaaatacatcagggcctgaaagacctgttgctttgcaatcgaacattatcacacttgtccaattggtatggcatatacggcgcggtcaagttcaagaccggcgtctcctcttcggacgcacaatgcatcgctacagactccttcgaagcctatgtgggagcgatacaacaacattatcgcaaaagcggtaggctaaacgagctttttacgagtggttcgaccgaattttcagcacttcggttgtgtccgagcgcctcaagtacgctgagaaccgaaactcgatccacacgaagagatctgggaagaaaggcctgtaacacagaacagaagctcagcgtgaaccagccaagcaagacacatcgggtgataccattgatagtgatcacactcctttggggacccagaaccccagatgggagtcgttaccaggcgtgaagccgaacgatagtccaatagccgagtcgcctataccagcgttggcctcgaacgcagaggggtcgtcggttcggtactgtgaagacgcaaacacaatgcatcgtagtgaactcgcaaggacgccgacactttgttcccggcctgcccttccgggtcatccgcttccgctcaagccttcgtttggtctcggcattgatcaacgtcgtttggacacctcgaccagtctgattccgctcgacagatcggggttagttggatggacgccctagattcccgtagacatggcagtcgggggagatcgcgtagtcttcaggcaggtccaagtcgagtggtgcgcggccgagctagagtagatacgacatcgttcaggatgccgccataactacccctgtctcggtccgcctaatcagtcccgaagctgttcacgagacggcgaaagacggacgtggaagacgcctggagtggacggcgtcatctcgaactttactcgccaaactcttgtgcgaagatagcgctttcacgtgtagatacagccgcccgtgaaacggcccgcaatcgtaggttcaactgccttcgccgcttcagccataaggttatacgagtccctcgtctcgatggcatcctcttaaaataaatgtgtagcatttctttaggcatggccatttttttcgttctctcatcgagtagtataaatagtgatagtgacatgtgtttcaatccaatcttacagacaagccgagaagatactagtcgaatacagtagtcggctacaggacctccttagatagatcctttacactcgtcaatttaggaaagccgggggcaggaggcgcgctgtgctgggtctgcacaaagaccttcatgatcccgccttgacgattgtcgaaagctttgtagagttcctcgaattcttcgaccgcaaagcgatgcgatacaaggaacttgcttgaccaacgtccactacaaggaggcaacgtcagaacctacacgatgagggcgcaggaggaattgtactaactccttgatcatctccaagatctcttcccagtaaagctaagagttgcatagaacatcatcagtacagaagctgtattagaccgatactattgtcgatcttacgtgaacgggagctattacgatcatgtggtgaattagcgggttcggaatagagcataaccgatcttcagagactcaccttgtccattcccgatgagtcggatacccttctccatgagcgcaccaacgttgacgtggttggcagtagcagcataagcggcgatcaatccgattctacattcgagaaagtagtgctgagcaaaacgacttcaaagcgaaaaatcaaattgaggcacttaccgtcccatcttcctaacacattgcaaagcctcgttgatggtctcgggaacgtcggtctccaacatgagggccttctcaacctggtatggcacaacgaccattgtcagccgctgtgttctgagagcgcctcgcgtctcataaagcccgtaggccccggaatacataccttgtgcaacatcgatttcggctcatggaaagttccgcagtccaaggcactacgacagcgcgtttcaacatctattcgaggccgagttatactgaggtataatttgacttacacgtcaacaccgcccgggtaccactcattgactttggcagggatgttggtgatctctttgaagttgatggtcctgaccttgcctggagcggcttcctctgccatcttcagacgggcggggatacaatcgataacgatgatctccttggctcccttgaggagagcccatctgacggaaaaaagggggaaagggaaaaaagggaaggattttcaaaatcgcaaggttcaacctctgggtcgccggaaagctgtggatcctgtttaaaatcacctcaggctgcattgtgcaattggcccggctccccagacagcgacgacatcaccctccttgacaccagtgtcaacgacgttgtgatacgacgtcggcaagatgtcggaaagatagatagattcctaccagtgcgaatcaaccctatcaggacccgccttccaatatctgcagctcgtaccaccttacgcacctcatcaggcacttcgtccgggattttgaggcagttaacgtcgccaatggggacctgtgatcattcgagtcagaattgggcctgatagcacgacattacagacatccttactttcacatagtccgcttggcctcctggaaatcctcctgtctgtgaacgatcgagatccgatccgagtgagaacgattgaggtccatttcggataaaaagaaacggggaaaaagaaaaaaaagggcgaaacggtcagctaccggtatgcgcactggttcctgtcgtacactcgtctagactaagcctggatacgcacgaaatgagagtatccaaagaatcctgaaagcgaaaaccccggcggttagacaccgaggcgtaaaaccgaaccagacacaaactcaccggcgtcggcctggtcggcgtgaatgttgccaccgtacatctccctcatcaacgtcgagttgttggtcctgtcgcagaacgacgacaacttctgtttgcagtacctgcactccccgcaggcaatctggaacgaagtgacgaccctatcgccaaccttgaggttcttgacggcgggtccaacgcggtcgacgactccggcgaattcatgtccgaggatatctcccttttgcaacccgacgatctctccatggtacaagtgcaagtcggacccacagatcgtggttgcggtaactttgaggatgacgtcggtgtcttgggtgatctcggggatatcggcgtcgatgaccttgacgctgttggctccttgccaggacaaggctttcattcccttttcgccaccctccctgaccttgtatgtgttctcgacaatgacattctcggcggggccagtataggcctggaagctgcgatcatgtcgtgacggcgtgcgaagaacgtaagcaaccaaacgacatcgggcgtacccatcgggtcgactcacgcattagcgacggcttgcatatctagatgttcgttggtttatttggtctggtctactcttgatattaattcctagtggattatctacgagtacgactttcaagctccctcctcgaccgaaacgttctgcttctgcactgtcttaatatataccaacaccggaccatatggcctctcgaacctccacctttgaaagggggcacacgctgcgcctcgtgacgtcagatatgcgcgctataaggttctcgcttacgcgaacccgattctcggatgcagaagaggcgtatcacgacggcacgggatcgattcggtcagtggccccctctgcttgtcgttgaaacatgacaggcgcagacctgtcggattcggatgaggtaataacgggttccaatgactgcgaccggagtattactcgtaatcgtatcgtctggctgctagctgagcggtacgcgatcgttctttcgattcgtcatagcgtcgagcaagggcgtccaggaaaagattctcgatatacaaaggacctttgcaggcactcacggtgagcaaagtgtagagcatgatgctgaccgatacccccatacggcagcctttcaagcgcgccatgctcgatctcgatcggtaaagcgatctcacgtcgaccaacttcgccagaggttcggcattcgagatctagttcatcggcaaggttccaccaatcgtgacgtagtcaaccgtgacgacacggctaccgacaaagatcgctaccggtcactcgcctcccaagcagatacctgctcgcagcagatgttggatagcgacatctgagttctaggtacactgagaggtggctgttttgagggtcgaaagggggaggcggtggaaatagcaacgctaagctcgaagggcgggagctatttccaccttgatcttcacggcggatcaagggattgatcgaagctgatcatttcggtactcacatcacgacctaaaatggcaatatctatcaagctcatcgacaacacatttacaaacaccagccatctgaccgccagaactataagactgagccccgtctgtattcgcttcggtgcgacttggtaaccagatggcgacccgcacacctcatccgcctctgctctcgagaccaccagcagcttagaagacgtttccgacatgcgaccttcttgcatatcccacggagtacaaggactcgggacggtcatcaggaaagacttgtaagcattcagccacactcatagccatccttgtgctccgctcatcgctcaagaacggtccacagccccgaccttatccggacatacaacacgagatggaccgacccgcggatccagggcaaaactgttgccctcgatgcgacccttatcacgacgaggttcttctacactcagctatcggacgatactctggaaagtaagagaatcgttatgggatggcaccggtgagcatatggcgtggtcccagtcgacacgttcgtgaccagctgagcctcgcccgactttgcgtgcccagcctcatcaacagtatgaagcaagccaaggtcaaacccatcgccatcttcgacgaaccgggtccacgcgaatggaagacccgggaacacctcaaacgtcaagctcagcgctcactccatctcgcccggtctctcttggaagacgctcgtcgagaacgcctgaccaaggtcgaaatggtcttgcaagagactcgagctcttttgcaaaacgatcagctacccagcgggaccgaggtggatatcgagcacgagctgttgaatctcgatgacctggatcctcaggcgatccccatgccgaatgacccgggcgagaaggctctacaggacgctttgctgcttttgcgagattgcagagcgtccagtcgaccgggagaaaaacataccatcaggtctgcttacgaggtcttgcgggatcgtttctccaagcaagatctcgatgccgcggaagcggccgagacggagcaggaccgagatctcgtcaagcgagacggagacggagacgccgccgtgatggctaccgattcgaaccaagacctggccgccagcttgccagagctggagcagaaagtggaccctatgcccgcagtcgaacctagcatcaccgccgagagtgacgccgcagacgatcaggagaccgacgatgcgctgctcgtcaagcaggaagaagacgatgtcgaggacattgcgaccgtcgtagtcgagccttctcatgactttaccgagtcgatccggcagaccgcattgacggcgcatgagaactacctcgtctcggacattatcaagaccatgacttcgccttctccttcccagacgacttttcttgaataccagcaggagctcagaaacctacaggaccgcgccaaagaagtgtccaagacgtacgagcgtagtcacgccaagccgaccgcacaggatatggaggaggccagggaactgctcgaggtcatgggtgtccccatcatccaggctgcctccccttatgaagccgaggggctctgcgcagccatggtccttggcggaatggcagactatgcaggcacagaggattcagacgtactggtctatggagcaatgctcctcaagaatgtcgggacaagcactctacccctcctatccatcgatggcgaagagttccgcaatgcgcttgacatgactgaagagcaatatcgggactttttgatcctaaacggcactgacgcttgcgagcggattcacgggatcgggtttaagagagctctcaagttgatcaaggagcacaacacgatcgagacgattctcgacaaaactcattcgaaaaaggtctcgcttcgagcgctgaccgaagagggatatctggacagagtcggcgcggccagaaaggtctttagcgatctgccgctactaccgaccgacgccgagatacagcagcaagaggtcgacgcgcaaatcgtcgacgactatctacgaaaccgccacgggattgctacattgagcgatgctgatacattcagcctcggggacgaggacgtcctggatggtgtgcttgatatccctcaggaaattgactttgtcccagacctgcctgaggatgtcccagactggatggtggaaggcgatccaccggacttacaaccaccgagatagatgacgacaggaaacttacgacctgaaacgaagactatttgtagcatctaattatgtgccataccccatccccttttgcccacggtgccgctaaattggatcgaaatacccccctttgagtgcgaccgataacttcgcaccgcataaccagtcgtgtgatgtcatcgacatcagcaatgacccctttcaaggaggtattcctctcaacactcggcgacacgtagaaagggcttctcaaaggcagaattcgaacaaagggaacgttgcggctgtggctctggggatcagggccagatctaccttcacgagaagcagcctcggaggcttgccgagtgcatcaaaggggtaatacaagtgggccatcccaagaaagctgtatatgagtcctcgaataccgtatccatgcctgcagatatgcaacaagtacgcttgtccagcactcacaaaacccaactacccacctcgaacatgggtctcttcagctcgcacaaaaacaaaccgaccgtgagcggcgcaaaacagaagcgcaatgctcccgacctcgatcgtcagcgtgccctcgccaagagcgtaggtaatccccgcatatactggcaagaagccgctgctgctcgatacgatgtcgacacgctcgccatgatcgctcggcctgttcccgcccatgcgggaatgatgacactcgaagctcttcacggcagcggttggaccaaagaggaactagctttcagcaaagccatcgcctcgactcgagacaacctcgactcgggcatcggaatggcaaaggagtgcgtcgaccatgatggcgggaagagtaaccctggtatggacgatgccattagggacagcgccaacgcataccaaaagctggttcaagcttggcgcgcttttgctaggaccaaggacaagacttgggctggacgggtaacagaccaaattggacagctcgctggaaccgccctcggactcatctgaagggcggcccgctcggagttatcatgctcgttggcagtaccgctacaagccagcgttttggctccctggcgccgtgggatccggaagcaaatttactttccgatgtcgtcttggggcgttgtatccacatcagtactgtagtgatttacggcgacgaggctaaagctcgatcgtttgtaacgacgatcctacgatttacaataagtcgaagaatctttcccttatttgccatgaatccccgcgtagcgatgtggatccgggtatcacggaccgtaccccgacagcgctgccaccgagatggcaagtccgagctctataaggtcaggcgacgtcgagtgatggccgtaatggcgatccttttctgatgggatcgacctctggacgagctgagcccgtgggagaactacccctcggctggactgtcgcccgcgagcaacgccatggcaaggcgcacgggatccttgacggatatcctgcggatgttcaatcgtcccatcccatcctgtctcgaccgctcgtctcatgtgatcgagtcacaaatacaccgaggtagagcaagagtgagcgaccaggatcggttgatggcaccacgtatatatggcttgtgaataaggtcagatgtccaccgcgagggtgaaagaacgttatcagtggtaaccttgcgtgcgcattttaccttgcttatccgcaagctcggcgaccacaatccctgtatggccctcgggtgttcagaagcagtcaaagcactcgacccgtgcattcgaaggatcgccgggcgaacacagcagttgaaaactcgacgttgcgcataggggcaccattctgacacatccagcctcatttattcccgtctcaacaaggtctgatcagcggtaaacccttgtcttgtcgaagtactgaccgctaccatcgctcgaagctagggttcaaaaagcctctcaaatcttgtctcgcccaatcgaggacgaaaaagccattagtactgtgttctgtcacagactcgaccagggcacctagctctgccaacgaccagccacagattccctacgctggtatcctcgtctcctcagccgaatcttttgtgagaacctttgggactgaccctcgaatcacatcttccctcgaatccagatctcgtgtgcgctctcaagccacattcagggcgcagaccccgaagttcatctggtgaaagtcaaaagaacccggaacccccgtttcctcgccttctcctccactgggcgcggcaggtcgcgcgggaagaaagaaaacggaatcagaatctcggggggtgcacatcaatcaatcaaaggatcagatcaatccccctcgttcttcttgagcacgacttcactttgagcatcgtttgactagacggctcaccaggtcaacgatcaacgagcgactctgagtagacgagtagcgagaagaggactcctggacacggagagacgcattaagaagagagtcgaagcgagtagcgagaagaagggagaaaaaaaaacgtcatcatggtgagcaaaccgggtctctttcggtctgccaagctctggtcgtgatggttggaaaagactaccgaagcgcgatgcgatgagcggagtgatctggagcgatcaatcttcaagtggacaaacaaatgtggcgtcgacgttgagtcgggagagaagggcagcatgggtcgctatcgggatgggatgctcgcggaccgggtggatcgatcgggcagacctcgatcgtctgggacatggacgacgagcgaagcgtattgatctccagctcgaggagcaagtggacattccaatggaaagggaaacttgccccggcgacaaggagaagagacaaaagtacatacacctacgcactctcaaacaggtctcgtctctcgatcaatcgacatcggtcgtccccttttctttcgatcaccacgcagccgaaacatcgacttcgatcgatagctatagctcgataacggatagctgatagccctcgctccttatatattttcccttcgatatcctccaataaccattcctcgattaataacctggtcggtggattgtctgtctactcttcctttggacctcttctccccacccgcgactcgcgacccgatccacctttacccaccgccgaactctgtctctccgtgaatcacctcgggccgccttcttttgatcgattcgacctggaccgacgacctcgcttgacacgaatcgaacgacgacgaacgactgccaaaccggatcgcaaccgacctcgcctgtcatacatcgcacgactcgcgggacgtgggtggttgttcgtatcccggatcaacctcgtctttgcctggcgacatccctttcgtacccatcctttcatcaccctccctcacggatacgagacattctcgtttgccttcatttcccaaacctccacatattccccttttcgggtggtacctggctcccctcacgactcctccgattaaaaatccctttcactcgcattcgtcgttcgggggccataatatctcatctgggatcatcgggtcgcctcgacgccatcggtcgaaaaaccaccttctacgaaactccgaccaccctcctttcttcgatcgttcattcgatcaatcgatatacataacgaccctctcgcgctctcgacaccatcgccctgtaccgcgaccgacatcgttcatatatacctacgacgtacccacggatcgatcgacgataccccttttaacctcgactcgtgaaactctcgccactcacccaatagtcgtataacaacccatcgtaccaaaactctgccgttcagagaccaaggatgttgttcaaaatcaccgtattaggtgaaggaggtgtagggaagacggcgttgactgtgcaggtgagtgtcaggaaatgtcgcagacggccggccaggacgttgtacaacgggccatgcgcacttgtcacaacaataggttctcagatgactgattcgccggtttcgatcatgttagttcaccatggcttcctttgtcgagacgtatgaccctacgatcgaggattgttaccgaaaacagtggacggtggatgatcaaccttgtctattagaggtgttggataccgcaggacaaggtgagctcgaggtgctggcgggtgaacgaggctcgaagctgactctgagcctcgatcgttactttagaggaatacacggctttgcgggatcagtggatccggtgagtctggtttgccaagcgatctctccgacctcctttactgatcagctctgtcatcggctgcgtatagcgacggtgaaggtttcctcgtggtctactctgtctgctcgagggatacttttgagcgagtcgagcagatcgtcaaacgtgtccgacgtgtcaaagaagaagccgctaccatgggtggtgcctatggaggtcatccctacggcgcgccttccccccaatccccactcggcgtgcgatcccacggcccaataccgatcgtcatcatcgggaacaaaagggatatgcaacacctgcgtgacgtacaaccggaagaaggggccaacttggccagacggttgggatgcgaattctacgagacgagtgccaagcacggattcaatgtcgagaacgccttcaagacggtcgtcaggggcatcaaggtcgccaaggggatcgctccgggacaaggtgcagcggggccaggtggaccaggggtaccgggtcaagcgggcgcgaagaggaggcggaggaggaataggcagtgcgtagtgctgtgagatggggctctatcgacgagcctgatctcgggcgagtgcggcgtcacgtgcgcttgcccaaaaagtgagtgtaactctcttgcagcaagattgctcatcgcgccgcagctgatcgacatcaacaccgcggtttgacagcctaacgaccatttacgaccgggacgagaacgcggggaaagagcaacgaccctgtggacccagattcttctcagattctgccgtgcttgtgcttctctctcgatcattgatcatcgagagtagtcgcacattagattcagcagttttgctgcgttttctgacgaaggaatacatgatgtacgacgattggctgtatgagacttttctagcatgagaaacatggactcaaaaagatttgcccactattcgctcaggggatcaggtgcgtagagaaactagacatgttttaacaagacgagacaggggacgaaatcatcggccccggcaccacgagttttccaagttgtagaacggtggaattctggtgcaagacccatttaccacgttgattaaacaattaactaggtacttttacatttgaatcgacgcgtctcgtctcgacgcgtacgcgacgcgttcaattcgggggagaggaatctggagagatgcaggttgatgattgatgtaccaagatgcaagacacttgatcgactttcgagacatcccattccaagtgattgtcaatcaaaggaacaacactgctgctacggtactctcgatcatagccgtaccatcaccatgtccatcgaactagagagcaacggtctgcttgggatggacccgccaagggagtccgccaacgacctagccgataatggcttgctagccggattccaggaagacggtcttcagggcaacggcctgcttgccatgatggaagatgatcaaatgctgctggatattgaaagtggaatcggatcactcgagcgaagagaagagaatggaggtcgaactacttcgccgccgcccgaagcttctttctcgactcctttcgaagccgacgatctcgactcggcgaatatgaacatgccaggaccctctaagcaacgaaagccatacctccatgtctctcgagatgacactgctctccgaaatgctcaggcgttgacattgccgaggctgttcgcttcgacggcggatggcaagtatatcagtttcggccggaaagtacgacggaaatgggatggtgtggcggttagtttggccggcaacagggagtcgagacgccactgataggttcatgatcgaattcttcgttctaggcgcgacctatgccgaaaggtgacaaggaaggcaggctccaacttctcgacgtgccctaccacctcctcttgaagcagatcgaccaggacgaagccgagcgtgccgaccagaccttgcaagccaatctcgctcgacaggaatacgttgatcgactggaacggaagggcaaagggaaggacctagggcaaaaagccatgtgggttgacaagtatcggccgaccaagtttaccgacttgctaggagaagaagtcagtttccagaacctcgatcgaggtcatgttcgggttgttaatgttacgatacggcttctcagcgatgccatcgggacgtcctatcctggttgaaagactgggacaagtgcgtgttcaagagcgttgctcctggggtacaagcaaagaagcgaagccggatggaaggcaacgaggaatttgcctacgtgagtcgccgaggtctaaatgacaagcacacgagtctaatcgaacgcttgaaactgcagtttgatgtcctcggtcgaccgaaggaaagagtgagttgacgttcatgttcgccgattcaaagttcatcggactgactctaggcctcacgctgcagatcctacttctgagtggacctcccgggcttgggaagacgaccctcgcacatatagttgcaagacaagcgggatatgacgctttcgagatcaacgctaggtaagcacttggaatggtctagattcgcaaagtcggcttgtaggctgatcacgcttcgcttccacagtgacgaccgttcggcagctacagtaacggaccggatacagaacgcgatcgatgccgggagtggattgcgaagtagagggaagccgatctgcgtcgtgatcgacgagattgacggagcagcaggaggtggcgataccgtaagccatctgttcgtgtggctcggagtcccggtactgatctcgatcgattctacagagtttcatcaagagtttgatcaagctgatccaggatgttccagccaataaacgcaagaaacaagcggccaagatcctgaaacgaccgatcatctgtatttgcaacgatctgtgagcgctacctatctttcgcgtgtggaccgtcggctgaacgccaccttacaggtacgcatcggccttgcgacctttacgacaacatgcccgaatagtcagattcaagaaggctcagtcgactctagtcgtgaaccgactgagaactatttgcgagagggagaacatgtcggcagatactcgtggcttggcagcgctcgttgagatcaccgaaggcgatgtgcggagttgtctgaatacactacaggtacttgtgtcccagcatctattgccctaggccaatactgatcggttgtcactgtgtagttcatcaaatcacgtactacagaagttacggagaagactgtaaggaacacggcggtcggactcaaggatggcggcgcttcgttacacggagtctggcataatcttttcgtaccggtttcgagcaagaagaagcgacagaatgggatggcctcgggagaagacgggaagtatgtgggcaggctggccgatgtcgtcatgagcagcggagatgtcgatcgagtcatgcagggtgagtgcgggggattcaaggggattccagtcttgactgaactcaacatatctggccattcaactaggttgcttcgaacattacccgaacctgaaaccgattgacgcgtctatcaagaacgtcgcacggatacatgactggatacatcattacgaccgcttgcatcatcgcgtcggtaaattccaggagtttgagctgatggggtacatgccatacgcggtcgtgccatggcacacccatatggcggccgctgctaataccgggagggcggtggatttccccaagaccgactatgaagctttcctcaagtctagcgcgatcaaagaaattggcacggccttacttcagtctattccggccaacctgagaaccatctacaattcttctaccatcttgaccgagcttgggccatacctaatgcgcatcatatcgccccccttaaaaccggtaagtcgcgatattcggcacgtgcatcgtctcgctcacacacatacgggccccaggtgaactcgaacttggtcaaatctgacgaaaaagcgactctggtccgcttggttgacctcatgatcgacctgaatctccgtttctaccgggacaagacagaggagggacaggccactttcaggcttgagccgtgagtgattcctgttacggacgtgttgagcttacagtgacgctcaacggctgggggcggcccattcttcagtgccatcgatgcgttcatccattacgatgggaaacgagcaagcgatatcgctacatcgcgctttgctattcgaagcttggtttcgcaagcagtaagctgggatcataatgagtatcggcgtgccttgccctaatttctcccttacccctaggttgatgtcgagatagccaagcggagaggagcgggtagcggcaaagaaaacaagcagctacatggcatgttcagaacgtaagtcctgccctctgcagtttgtggctgcctgtcaaaatcgcgtttgacgtaatcgtgcctttttacattcattgtagtgcgcctcaagaggaaaagcctgttgatctcgccgacaaggtaagtcgctaacttctggctgacgatccaatcccgactcatatccggttcgatagccacctaccgacttctttggtagagccaaggccagtgtggtgggtccggatggaccaaatggtgccaatggaaagcctgcgaagaaattccggattgtttacaagttcaatgaaggaagctcgagtgcagttcggaaaccggtccgtatggcgacccttctataacgctattgttagagccgtacttgcggcaatacaaccagccggcagcggatctatgataatctaccatgcatcttgccctccatcagcacctcaaaccccttgaccgtcagaccctgctcgaattgcggctcctcgcctgcccagccttgaccctgatatagccgcagcctccataaagatttacaaagctcgagtgccgcattgtcctttcctgatgagaacgtctgcggcgtcgatgataccgccatataaggctgggtgccggagcgacctgccctttccagcgcctcaaccacggatctgtgcatccaccgtggaagcaccttgtccatctcgtaaaggggcacgactctgtccggcaagcccgacctcgatgcttcgctatcccatactggatagagcgggacagacgggaaggccgacccttcgctttgcagcaagtcgtgaggatgcggtcgatcgaaagggtccgtagacatcgctcgtgtatcgagaatggccaagagaccgggtgtggtattctctccttcctgtagacgggcgatctccatcgaggacacgctagcgagcgccgatggtctcaaagtgaccaggcgtaatagatcctgtactatcttgctttgtagctgattctccacctgcagcggtaagagctttgacaccgttgccgagctggatatccgcttggcgctccctacaacatcaggtagcattagaaaacccatcgtatatgaccaccttcgagcgccttgtgacttgcctggtcgatcgaggaagctctgaatcagacctcggtggcataacaaccaggaacccttccccagcttgtcattcaaattcgggttcaagatcttgtcgggtacgaggtagaccttgccttctctcgaatctgtagcagcgtcaggatcttcgttcttagggtatattgcaggacgaaagcagatcaaaaagtctgaaaagatgacgcttgatgagcgaagatggtcctggtcgaggaaagcggggaagggatcacctcgaggtagtttggctcctgtaatcgcgcatttccgcatgggagaagtcatcatcctggctagagcgaggaaatccgtcaacctcatacgtcgatgcatgacggaaggatgtagttaccgtgaagatcgtgacggaacgccacacctaggtcaccgggccgctcatcgcccgaaatcggcttgacctgctgctctggaagctctcgacctttccccttctttatcgccgtgagcgactggtactcggagaatggatccgcatacgaccgagttgttaagcatcgagcggatactttgtttccctcagcaagatgtgaccggtctaggtcggacttgctagtttcagcccatgcgacttttagcgtataccggtcggccgcacttacggatcaatgtggttcgcagcatcgatcgacttggcttgaagtgatgtctgaggaggtgaatcctatgcgggtatgagtcctgaatctgtatttgtctaagcgctggaaatgtgcaccttaatcccttgatccattgcctttgccgtctgcagcatcgatattgagatgcaataagacagagtggttgtccaacaacccgacgagactgaatgatcaccgagtcgaacgtcaatctagtcacgtgatttgtccttcgtgcgtattcgtcactttgcaacaaactccctgttaggcgttggactctttcaattgaatatcactgtcggaccaacaccgaagtacattacacatatccaagtagcgagaccgtactctacaacttggcgagagtcgctgtggagtcgctccatgactattattattgattgttcagtccagcgacatgagctgtatgactttgcgacacggagacgactgtgatatttgatgtccgcatgttgctatcttcggctagattcccgcgatttatgccgttaccgcttctcaatctagagcttcacgttcaaccttttgtgagattacaactcggatccatcttttcgacatctgcccagcctacttgttgggctgttgacagtagctgaaaactcttaccacttctcaggtgacatagctccgatacgctctcatcatgtcacaaccggtaaacctcgtcgcaacggcgctcaacaaggccggaatcacgaggggtaacaacgactctcgaggcgtggtcggccgagtcgcaggtggctcgtcagggggaagagccgcttcgtcctcgtcagccggtatggaagtagagagagatggaccaggaggtggaagaccgggcaggaataggaaggtgagccagctggtgcgatttttcagagcaaaggggagggtcggagagtatagtctatacgattgcacgacccctttcaactgcagtcaagggccacgggcggctcaggccagaaaccaagagacaacatattagcagcggcaggaaataggtgttccttaggacacttctggctgatagccagactgagcttccgtcgtgagctagcaagctgcagctcacgcgtagcaggtcaatgctcgtggcaggcaggtcacactgtcctatcgctcgtcgcgagaccctctcatccccatctattcggcagccatcagcatcatcgagaatgctgctctccatatgtcaactttctcgctgaagctgacccagatcgcgcctttgtacagtctcacacgagctccaccccctattctgcagcatcccgcccaagcagaccatcactcaacccctcccgtccaggtcgttcttcctccgtcccaagccattcccaacctacgacatcttctacttcaaaatctgctcgaccgggtcggcgagaagggccatccggaaggaaagatgtcgggacggggggctccgggactgcggggtcggatggtgggcagcatgtgaagacgctcaaggagtggatcgggacgagaaagcgtggaccgggcttgatcgatctgagtgtgagtctctcgttacactcgtcgtcagaggggtcaggatcgcacgtacgaacgctgctgaacgtgttatttgcgtcgcgtgatcgaacgatcaggccatggcgaacgatccagtgttgttagcagctggactcaaacctccaggccaccccgacgctttcgctcagatgggagatgttgtatggaaggtggtagcagaggatgatatcgtgagcagatgcatgaatcgggctgctttttgtcaacttccacctgatacccctatcggctgttcttccctgcgtagcacacgcatacgatctctcttcgagaaaacaatttcaagaacctccgacaactgtcaaggatcggtttctacttgccacatattcgggcactcgatttgagcgggaatgagggcatcacggatatggtcggaagtggtggaattgacgtgttgagttgtcacccttctgccaggagaccggacgcttcaggccatacgagcaccgcagactacggcaaggtgaggcggtcatcacacgagccaagtataagcctggacgctgagttatcatcgtctatagcatgggttaaggttcctgaaggagatcatcttgacgggctcgcgattacggaaagacgcggaaaagtacaatcgggtcgatggatatgtcaggcaagtctcaagtcgtatccgaagctctttccgacctaccgccgagctgaccctgatgcacatcgacacagggacgtactcgttcggttcccaaacctgaccatgctagatggccagcccgtacctaggcttgtcttgccggtcgacacggacctgccttcgaaaccgatcgtcaaggaagagatggaccagctaaaagcaagaccttacacctggccctttgacgtgcgggacaagtgggcggacgcggatgcgatgagaatcgtgggggatcgattcctggcaaagtcggtcatcgccatgctttgtaaggcaagttacgcaggctcaacgccttttgtcgcgtcgtcacagattcttcgaacttttcgataatgaccggaatcaactcctcgtcgcctacgccccgaacgccaccttgtccatgcactttaccacggccgtccctcctcgagccaaggtggcgggttatatcaacacgctcccaaaccagcgtgcactcaattacgaccggctgaagaaatccgcgcatcgaaatttgatccatacgggtcctagcaggtggacaaagagcttggtcgtcgctacagatgagaccaagctgaggacgtggctggttgaggatctgcccaagaccaggcatcccctgagcgaggttgacaagtggatgtatgacgtgatcgggatggacccggtgaacgggatcgggcggatcatgttggtcgtccacggagaatttgccgaacgtgagccccgtttagatgtgaagaaaacattagccgagtaactgacacggatctggtctgatagtgcccgtcaacggattgaggtcgttcacgaggacgctggtgattgccgaatccgctcctggcacaccgtgagcaccgtcatttatctctttgcttttgatgaccgactcgaatcctctgcttgtgtcaggtctcaactcgccggatgggatgggatcatcctctcggacacgttctccatccgacaatactgtggacacgtcaactttaccaaaagtctggccgtgaacgatgcgacgatcgtgggtggaggtggagcggtcgatgtacaagttgtgggcagcggtgtgggaggcgcggtcgcagctggaggtagtgcagttcagggaatccccgctgacatcgctagtataccgaaccttgtgagtcgagtgaatcaagattatccggttgaccaattccacgaagactgacctgaaacgctttttgaaaagtcgcccgaacaaatgctggtcatcgcccaagtccaggcgcagaccaacttgatcactcagggagcagctgatttggccatgaattcgggattcgacttggccaatgccggagcgaggttcgaggaggtcaaggcgagtaccgtgtcatctgttgaactctcatcaaaccggatgaactgactttacgagaagggcgcgttttatccgagagcagggtcagatcccgcccgagttgttccggcaataattatgcagggcacggtggagtatctcgacaagttgacaggtagactgacacaccatcgccgagatcccaatgacaaacagtagtgtagatcgcagtagtgcaatagctcatcggtgatgatgtagattatcaatcaaagactgcgccgcggtccgttacaacccaagtttctctgctcatcggtcgccaagaccctcggtctaggccggtctcgagtgatcggcatcgcgcgagatgagggctcatgccgaagtcgcgttgttcggcttcgtctcgccctggctcgtctgcctgttcgtgcggaccggtacccgcttgaaccggcaaccccgatcgcgactttcaccttctccttccccctgctgccttccttgcaggcccgcgaacctggaagctattcggcctgtcggtcaaatccgagcgtacggcgttgttacgtggggggtaggaaaaggaaaggacgacggtttgacttgaaaggtatgactctgtaaattcccatgcaaaaagccgggaaccaggagaagtcgagagggaagctaacgagatcgttcatcctttcattctcgaatggccacaagtgaccttgtcgtgtttcatattctcgacgactagcctctcacctgaaccgatccatcgaagaccaaaggatccccaactgaaacgccgagaaagacggtcgcgcgaaagtgaaaaaaggatcgactgcttagcacatcaaagcaatttcgaagctccaggatggccatcccgtttccagaattgacacaattcaagacgagggaagagcaggatcaagagatcagggtctcggagcggccctccgtgtatcgacagcttacaagaggtgagagcgtttcgacggcagcctgcagtaaattcaggatcgctgatcatcggtaccggctatcccgcgaacctggaatttggcgacttgatctctttacagaaaaacgcgccctcgcgaccattccggatcgaacgagcgacgagacgacgcttgatccggacgacgagacgggcaagagtgggaaaggctacatccctttcgatggggggttgaacgaactggagaaacaggcgacgctgggaggcaagacgatcgtttcgtacccggatggcgggcttcaggcctggttggtggtgctcgggggatttttgatggtattctccggtttcggggtgagtccgagcataggcaattgaatttggtgtctcatcaagctcatgcggggtctcgatgttgggtgcgcagatgattggatcgtatggggctttcaacacctactatcacaataataacctctccgcctacccattgtaagcgaacatcgacccgtaaacgcctgttcagcgccaacctaacacttcctgtatgccctcgccgcaatagatcagtgacggcctggatcggttcactacaagccgcccttgtgttcctcttggccatcatcggcggatcatgtttcgacaagtacggacctcgaccgttgatgatctttgggacgatcacttccgccgccgggtacctcgctctcagctgggtgagtctgcaacgttcgtcacacaaagtcgtctggagcgggagtgctgatgttgttcttgtacgagggaatagtgcacccagttgtggcacttcttcttggtccagtcggtgttgatctcgacggggatgggagccatgttcgtctgcggagtaggaggcgtggcagagtaagcagttcaggtagcaccgagtattgcaagacccaattgctaatcttgttcggccgtccagttggtttgacgagcgaaagggattggcgaccgggattgttggtgagtggaatggcacacacaggcctttcttgttcatacatcgtactcatcgaaactatgtgtctaaagtcgctggtagttcgttgggatcgattgtttggccgttgatgattgccaatcttccgcaacgaggtgagtctagtaaactcgtcctgatgctgttagagatactgaccagcgccacccctccgaaacagtcggtttcggttggacggtccgaatcattgccctgatccaattactggcgctcacgacggcgacctttctcatccggacacgtctacctcgacaacagggcaaaccgctgttcatgcccaggacgttcctcactcacccagcatacacttgcatggccgcctcgtgtttcttcttttcgatgggcttctttttctttctcgtctactgcggtcaatacgcactagaaatcggagcaggggacgccgcgccgtacgtcttgatcgcatgcaacgccgccagtctgctcggacgaatcagtagcggtgtcattgccgacaggctcggatacttcaacatcctcatcctggaacttctcgtgaccgtcgtcatcatctttgcctggatggccatcaaatccgtcccggccttgctcgtcgccgccgtcttctatggactggtcacggggggaaacattgcgcttcaaggaccgtgcgtgatcgccgtgacaaaggatttgggttgtgcggggacactgatcggtcagctatatggtgagtgtgctcccaaggtgtcgaatcatactgctcgctgacctgatcgcactgcaggctgtcaatcgctcgcgctccttctcgggccacccatctcggggtacatcctcgggaccgacccaacaaaacagatgacaaactacaagtatgcgatcatcatgaacgggctgttcatggtactggcgacggggttcgccgtgggagcgaggtacttccagaccagaaagatctttgcggtgatataattttcgacggaataagacgccataagcgtccacgatgcaggggacatttagcaaagcccgttagaatttgagacgtgtatctatatagaaaggacaagggtgtcgatttgcccggcgatcatctgatcggacggcacagtcatctcaattcaggcgctccttcctagattcagattcgaagcccgtttatcagagcttgtcacggtatgaaagcgttctagaacgtggtcatgaatgttcatgggcaagggctttggccacagcggtaaactacccatgcgaggcgatttcgcgctcaacacacagagctagcctaatcctactcgcggtgcggtcgatcactcgaatcgccaggtgacatgccccaaatcaggatggtcccctggaatcctgccgtaagtttgagcgttggcccccaaagatggctggaagacttcgtcaaacacagccggagagacgtccaagtcgttacccgtgcagcccatacatttatccaagaccgggacgccagtaaccgagtgacccttgtctgcgaccgagatattgtcagtaccgcgaccagggatgtgggatagaactcacaagtaatcgtgatcgtctttccgcaatggacgccggtgttgccgttggtaggaatgcctccgaacaaagccggagctgagagcctcgacatcagtcgcataccgacttgaaacaaaaacgcctcttcttacctagggcaacatggcggcttccgaatttcggtccgcaagctgacacggcatcagggcctgttggattgaaagttatcgaaccagcctcgtaatctccgctagcgttagcgttggtagcgggagcgaccccggcggcggtcgtgggtaatggctgtgtcgtggcagcgggtgccggatcggccaccactgctgtaggaatcgctggattagcagcattggcgtccagggccggcaggatcgatgaagcgggcgcgggcgcgggcgcgaccatggtgtccggtgcaacgggcgcagggtcggccgtcgtagacacgagctgttgggtggtgacagcagccggaggaccatggccgtcaggacgaggtcgaccgtagtccatgtacgccgcagccacggtcgcggttgcgttttcagtagccgacgtgtttgtagcgtcggtcaaggcagtctcgcccggaacggcgccggtcgtggtgaccttgaggtcggtaccttgcggagactcagaaggctccactatggccgtgtccgatccagtcgaactggccgcagcgtggtcgacactttccggggtattgccattggccgttccggtcgctacgggtggggattcccccgtagcggcaggttcgaccccgtgctggtcgacatcgagaggacaagcgcctccggaagaatcgctgacacagggagaaccgtccagctcgccgacgtctttacagtaagtcccgggaccgcattgcatctcggccccgccgagccagaaactggtctcggagacgcaatcaaagtcggcgtacccggctgaggtcgattcgatcggatgagccttggctaggggagccaggcgggcgatggtgaacacgatggcgacgagattgacgtgcatgatggtccgagtccgtgatgggtgtttctaacaagagagcgtgtgagggtcgttgtgtgtgatgaatgtatcgagaccagcccgatgagtcacttttgatcctgtcgtgtcgatgccaaagtgtatcgtcctgaaaaactcctctcaatggaatagctctccgagtcccttttatagccatatcgtcagcgatgaaacacgacgacgcgtgaggccccccaccgtaaaaatgaccccttgtctcgaccatcctttcaaagccagggccgtgacatcgccttgaaggcccgattgccgaaaaaatcgtttcgggcctcccccctgacgaacgaggatccctgtaccgagctgggcttgctgtgaaactctcctataaatggcgaattcgatagaatgctcgatatctgctacaaaccgtgacgcgggacgcgcgaaccccctttcttcatggaccccctgatcctcgcgacactgtacatcctgctcctcagccgagtccttttccctgactttctctcacacgcctcggacgcatgtctggcgtgatgacagaggaaagctgcgtttcggatcgtgacctcaggtgttcttgatgaggagacagttgacgcttcccaactgtcgtctaatatcctgatgatcgacatcgtgcgctgcaacatgacgtgacccacggtcgttttttgttttgtcaatttcgacccctcgtgcgtcatccggatcgttcgaaacggatcactcacaatcctctacctctccccacaattcgatctggctctgcacctcgacgagtgcgatctgcgcggcttgatcggcggtgagatgaccgtccacgagggcaaaggccgtcaagaacgatttcgtcgaataggtcgctcgttcgagggctgaagatgggtacgcacaaagacgagcaagtcagcgtcagcgacgtcatcgtcagcattagcgtttctctggatgaaaagaatacggccgggcgagatcgactaggtcgtccgatcgacggattgacctcgccccgaccccgacattgacccgcatcgactcacccgagatctgccactcgtcccaactctctacgacctttctcaacttttctttcgtcttttcgtcctgttcaaacctctttcccggggcgagtacgagggtttcatagctgacgatatctaccccgtgggtctgcttgaagtaggcatggaggggttcccagtgttctttctggagtcggacgagggtggagggtctttcggatgggaagctatggcagggcgggggcggcggtgtggacgatgagacgatgagaagatcagacgatgatagcagacaacaaagatacaacaccagggcgtctacttaccaagtcgtatccgtatcgaggtaacgcagcaattcatcaatgacgcccgccttgaccgtaggatcggacatgccatccaaagccctcgaagccaatgacgtctgagggtgcccggtccggggtataatataatgttgtctgagtaagctttcaaggtgaatgacgagaacgcacaccgcccgatcttgcgggggaagcgggacgacggggaaaggaagactgaccatgggcaaccccgagaccttcatgatctccttttggttctcccattcgttggcgatcaacagggccaagattttcctctctgcgggcacttggagtttcttccccgatggggtcttcaagggtcttccatcgagggtgatcaggtagttttggggtgcgtcgagcgggagaggttggatgccgaccgtcttccaaaaacggcggagttgagcctcggcacctatgggtcgacgatatccgcggggttggtcaggtcaggtcaggtcaggtcaggtcggatcggtgccaatgaattggatgagaacgagacggatcgaacgtacgtgctgtagggttaggatcatccgtccgctgtttcccaagatcgggggtgatgaggggaggtgatacggtcgatgcggctcgggatgttgaaggtcctgcgatgatcgacctcgagacgatggatggcgttgtcactgtcggccggaacgcggcggttcgaaggagtgataaagctgatcgtcgagacattgtactatggtggtgcttgactgatcaggctgttgtgtgctggtgtcaacaatggatgtccaacaggatgatacgatgacgatgacgacgatgatgatgttcaattgccacaatctctgctggttaaaggttgaaaagttcaagtcgaaaaagtaaacacacaagtacgagctaggtagctaggtagggtaacaagctaggtacatatcatccattcatcctcctacaacatcgtcgtccatcctcttgtgtgcaattcggaaccacccaggttgcaggttgaccttgcccccgagatgagcgtccttggttctacttcactcccacacgcatcgattcacgttcacggtcgacacctcttggacgaccatcatcgcgtcatccacttgcgaggagccaacgtctcgggatgtagtaaagtgcaagtcccgcccgatcgtccgtcgatctcgaccagacgtcatacactgtaccatatcacgtgggattgtactgatcagatattccttgttatgtgttcaccgtcatggcgaaacgaaaacagaccgagctcggatcctcgtttggatatcgagaacccaaaactagcttcttatatcaaccgaccgttctcgctcggggaagcacccttgcattgggccaggctgaaacgatggggattgtattaccgtgagtaccacccgcctctctcaaatcaattgtccatccgtgcatacgtgttatacgatgcgctcgagtcgaaaagtaattgtgattgacataccatccctctcgtctttttccggggaaatgctatgaacggacatagtccggatcaccgtcacatgggaagccatcgagcattccgggccgtgagtcctcgagcgtgccatcatcctcttcccctgcatatggcctatgatcggctgatcgaaaggtctggcgtttcgtctcgcttttgcatttccatacccatagcggagagtacgatgaagattacctgggttacctcagagatcttttgaaggggatgaccgatgctgggctgatctgttacgtcgtgagtggctctccctgtttgcgttcttttccgtctacctcgtcctcctgttgcccatctccatgggaaagaacgcgtttcgttcgtcgagctgacgatgctttcgacaacgatcgtcacaggcactccaccaagacgtctggtcccgattatgcggcggggtgagtccgaacccccgtcttgcccctatttaacgggatgtccaccctcacacgggcttatccctcgaccgtttcctacctcctccctcgtgctcgtgttgccctgtctcgcgcctagtcgggcgcaccggcatggacgatccaatacgcagggatgaccctcgacccgacgattctctcccagaccggcggagcttggatccacggggtcgacatcgcctcgcggtcttcctccacctcgagacgtccgcccgcgatgaccgaggtgggcgagggcgaacagttggagaacgggggtctggtagggacggacggcgaggtgtttgaacgaggggaaggggagggaggggaaagagggttatggcccaccggatatcaaaaactggtctgcgcgacgatgaagtgagggacgagatcctctcgtagatatcggtgtggactttcaagctgatcctcttcaacgatgatgtcggattgatgccgcctcagcacgctattctgggcgggcaagacgttcgcgcccaaccttttgatcaaagacccgacgtctgggggccagtcgaagaatatccagacttttctgcaagagaggtacctggccatgttcgatcgactggtcgaagcgctcgatggcatcgagggagtcttggggtacgaggtgagcggtcagccatgaaggtcataggtcagggttgtcgctgaatttgaatttccccggcattcagatgatgaacgagccgcacccagggtatatcggcatcccgagcttgtacagttttgtgagtctggcccgctatcctcctctcggaatctaaaccgccatgctgacctccccctcgcgggcgtcagaactatgataccgatctacacctcggcaactacccctcggccctgcaatcgttcgcattggcagcaggatacccgcaagaagtcccgcattacgtacggagttggccctttccttccaagatcaaggggtacaggacgatgaacccgaaaggcctgaccctgtggacgacagagccggcgagcccgagcgggcgaacgttgtcaaaagaagctcgatgcatctgggctcgacatggcgtttgggggtatgatgccgatacgaaacgaccgatcgtgctcaaagagggatatttcacaaaagacgctcagggacgaggcgtcaatttttacacggacttttactggccgttcgtcaagcggtgggaagatgtcgtcaagcagcggtccggagggaaagccatgctacacgtcgaaggggtcccgaacgaggtgagttttgaaggtccggaccgggcgccaaattccttgccatccaggctgaaatcgtcacgacctgcagttctgcccagattggccagaagatgtccggccgcggaaaaagctcgtattttcgccacattggtacgacctgaacgccctgttcaacaagagctttggattcatgaccgtcaacgtccagggtctctcgagagtgagtcgtcgagcttggcatcaggacactactcggattgacgattcgagggcgtttatcagggcatgtttgtagggaaagccatctactttgggcacaaggcggcccgtaacaactattcccttcagatcgcgaacattgtcaaagccgctcgactcaagttgggcgaggtccccatcgtgatcggcgagacaggagtgcccatggatctaaagtgagatgacaggctgggcatctggcgctaggggtatccagcagctgatacatgactgaccagcctcaagcaggcgttcaagtcgggtgatttcaaatatcagtcacgtatggtcgattgcatcttgacggcgattgagaggagtctgataggcgtcaagtaagtacccatgaccttcaagttattgcgatgccgtgtaccgaccaaagctgactcttggctcgtctcatagcctttggaactataatccgaaaaacaccgacgaggcgggcgacgaatggaatcacgaaaacttttcctggttctccgaggaaaaacgtcaacacgtattgtacaatcgactactctgctcggagcgaccggaagatggacagggcggagcgctcaaggctgaagatctcgatctgggagcgaggatgctcgacgagatcgtcgtgagtattggaggcgtttcgtcacgcccatggcatacgctgatcaatgcaagtcccgccctcagcgcccatacccgctccgaacggccggtatccctctcgcattacgctacgacccggagactaccgtatttcgattcgggttcgccaacccggtggacatcaaggacgaacgtcctttcgattcgactctgggagcccccttgaccggccatccacggataacgtcgcgtgagacgaccatattcctcccgcctcgtttcgttcaagcatggaaacgacccttttcccatcgtccctttcacgtcaagacgtcggacggtacctggacggtggacgaagacgctcagatgctcgtttggacccactcggacgacgcgcaaggctcggaacactggatcgagatgcgtatcaagccaaagggtgaaaatggaccggcatggatcgaggtcgcactgttttctctgctggccgcgatcgccgtactgcttgcgtattacttgaacacgcgagtatagtcgcttgtggcaggacgagaggtgtgtacgtgttggtcgttgtgacatataccatatagcataaacaagtctgcttgtttcgccgatcaaatcacgttatcgttgacatgacatcgcggtagcggcagggcctgagcttctcgagtatatcgtatcccgacgggttgaccttctgagctttcgctctgaagtgctgctggctacttcttcatctccgccgagtcgccaggtcgatcggattgtcaaatagacgtcagggatctcggcgcctttccacctgagcgcttcaagatctgaaaggcatgccgccgagcatccaaagacaagcggcgttcaagtctgggataatcacgagccgacgacgcttgcctctctggcgaagtcgggcgaggtcaaggccaagacccaccaaagggtcgcgctcgacaccagaatctggacagatcgagaggatcggtaggggtagccggcctcatccttgaggtaaagcacgtggctttacattctactttgaatgcctatttcctgcaagatccaacggatgcgtcagtgctccccagtatcaattctctagggccacggaacgctaccgatttagacccattggaaatcggacacgtcaagttcaagcgtacacagctgaacacgggactgcaagaccaactcgaaagatcctcaagctggcaggcctcgaaatatattgcaaacggtcaactcgcaatggacagcaagcagggcccgagttcaatgggtctctttttgaagctcaggcaatctgaggtggctgctctgcttccatggagattcctgcactggcacttgggttccgagccagagggatctggtactgccatagtcgcacctgaaggtcatggaaccgctccgagtggacatcaaagacttcttcaaacagactccgaacgtctctcgttgtagccctgcgcccggaccctgatgatcggagggacggcaaagcacggtgaacgaactgttcctcatgtactcgcacgtttcatgctgctcgcgatcgaatcgatcatccccgccgtcttcctgtttgtgattatcaatgtacaaccttacgacctcgtcgtcttcttcttccgacccccaaactcaagccttgtcagccttgtcctgttcctccctatccttcttctcggcctccaactgccaagccgggatgctcggtctccctccagcgaggttacccaacaggttagcccccgtcgtgctccctgccggggaaccgttggcgttcgagctcgaacgggaaggtgctgacggacgcggggcgaggagtgccgtagcttctgcactgggtgcgggaggttgcgtggtcgtgttctggtttgccggggatgatggggaagagccggtgttcccctgttgttgttgagtgggatcggacgatccggattgggatggacccggggtaagaggtcttcgggcctggagtagcgttcgaagggatttgatatcggtttgtaattcctgcaacgaggatgattgtgccgaggcgtgtttctcgaccatctacgcgccaggggggggggggggggggggtttccatcccccagaggtttgatgaaaaggtcaagcgcttggacggaaacacgtcgccaaatcgttcggtttggctctttttgcgccagtattatatatgtgcgttggatttcctttccatcccccagaggtttgatgaaaaggtcaagcgcttggacggaaacacgtcgccaaatcgttcggtttggctctttctgcgccagtattatatatgtacgttggacttcttttccatcccccagaggtttgatgaaaaggtcaagcgcttggacggaaacacgttgccaaatcgttcggtttggctctttctgcgccagtattgtatatgtgcgttggatttcttttccataaggctcaccatagctcagttggtagagcgagggactgtaatggattcaataagtctatccctaggtcatgcgttcgactcgcattggtgagattactttttgcgccgtgagtgccggtttttttttcgtagcggcaaaacatgctggaacgccttgctcgtttggcgcacgctcacgtcgcgctcgggtcgactcgaatgcattcttcttggcgatgagccgaggttatgagatggggatcatggcgggcgatcaagtcaacgaacacgaacgatctcgtggcggccctcgagcaggcgcatgcagtaccattgtacttcaaggcctgccgatgtgtaaaacaggggtcacacccggcctagggtatggctacgaatgtgctggcgctatcgaccatcgtacctgcatggtcaatgcccgagccgcctatactcccggtggctctgtctgccactctcgatggcggcacatcgcataacatcggcaaagcttgcggcttccccagcctcatgatatcgaatcggatggcgcatcgcagcgagacggccgcggtcgcttcagtagggacgcaaacgagtcaccttgcacagaggccaatcgctggtcacgatcaccaagagggtttccggcgcgactgccatccatgcacacaacactgtcgcccagcgcgaaaagcatcaatttcacggcacagaggcaagtgatcgagaagaacacagaaaccaacctaagcaatcaacttcagcatattccacggaagggtgggactctatcgatgaaacatacgaaggagttgtaccgtttgctgcgcttgatagacagacaaggagacgaggcgcgatagatagtcggccacgttcattcgcacaacactctgcttcgtccactagccgccgatctgtttgcaaagacggtctacggcaagaccacaataactcatctactcgccgacagtggctcgtacaaataaagaatccgacacaattcggttgcaaatgggcggctcgactttgcttgcacaaatgcgatctctacccacaaagctgtggtaggaccagtagtgactccacattcggcgacatgatctagactacattggggtagcaacccgtcgatcacggcgatcgcctcgccgggatggatcacgtacgacgatcatggcgttcttgaaagtcatctccgtcgcgcgggtcggcatcgacctcgttcacatatctatcgagacgtcggtttcgaattgtacgacgcgactctgtcgtcaggaatatgaagcgtttgagaatggtggggatcgttgtgggcggctaagcgcgataaaaggtacgagcagtcttctcaagcccaagcctagcccacagagatccagcccatacgagttggtcaccgacgtatatcctcgttcaagacgtcgcgtcacgtacagcgatatcgccctcgaggattatacgcatatcaaccgcttgcatctgcacaacccactactgcacgtctcgagccatattcggcgtctcctcatccggattccccccatccgattctctgagcgacctaatcttctcttgagctatccggagtccaccttcgaccgtcccgagtatcgctccgaatgcgagcgttctcacaaagaggggtgtagggaacttgtctgtgtcgagcggaaatactttgagttccagggaaaggcgacccgacgtgacctcgacgtgcactcactcaacaacccgacgatcgcacccagcaacgacccggcggcggcgccatcgagccaaacgagctcgtcagccttgctcgccttggacaactgcatctcgtgttgcaataccgcctcgacgacgctttccctgccctttccctttgtctgtgcggctgcggctaccctttccacgttgaccatgttgcgaatacctagtcgcatcttgcgaactccctcttcagccagtacgtacactgccgtcgccgccccgagtttgagggcatccttggctccctgtcgacatgccccgaacaagattcgataattccgcgttttggtgtaaaagtactgccatgggcgtggtgggaatggtcagcttgtacgttaccgtctgatcgacaccagtgacctatcctcacccatccttgcactgtcgtcggtggtcgatgagcgttctcggccaaaaacctcagccttgcccggctacctccccgtgaaagtccgacaaaggcgcccaacgcaaaggcagcaggggataggacgagcaaccgctctggtagatgaaccgagatggccgagtcatcgtcgttcgcttgtacgacaggcggcggtaaagagcgagggggcaaggtcgaagtcgacggttgggcgttgtcgtttgcgttcaagaggttcgaggaagactcaaaggcggccatgtttggtggctgcttgtccgggattccgtggaaagggtgatgcgtgcggaactacctcgagctgatagtggtaattctatcgccctggaaagatgttgtgtgattgatgtacacgacgggtttgcgaatgcatgttgtactcctttactcatctgattctcaactttctatagccaggaagcgcgctcgccgagtcgatctcggtcgagccaggatcatatgggaccaacttgtactcctaccatactgttcgtctacgatccgatatccagctaaccccctgcagtccttgtacttcggatagcagatagccacagcatagagactggggaagaggaatcgacaccatggaaccagtgagtcagcatcccctggccagccgtacgacaaggctaatgtcacgacctgacctacaggccggactcgaccttgacgatctcggtaagatccacaccttgacgattcaaagcagcccagctctcaatgctgacattgtgggtctgacgcagctcaagatgtaaacttttccatgggagatgggttcgaacggcagagggcagaagcagcggccgtcttgcaagagttggacaggagacgagaagctcgaacgatggcggtcccaaccgacactgagcaggtcaaggcgagactgagagagctaggagaacccgccactctgttcgccgaaggggtgagtcgagggtcatcgcaaggggagatgtggccgtactgatgacccgaatcgacagccgggagatcgacgagagcgtctaaagtatgttctcggtcaaattcgccaagcaagaggggaaggggagatggatgtcgaaccaggtagcaacgattcgtcggattccgaggacgaagaggtgagtctttacgaggtctaccgccgacgagcaacagattgactcatagattggcacaacagaaagaggaagaattctatacgcccggctcagaagagctgttactggctcgaagacggatcgcagacttttcactgaaacggttggtccaccctcctctcgatgccgtggctgcgatggtttgctgacaaagtacgtacgacttggcagtgcacgaaaacgaatagcgaggcagaaggaagaggccaagttgccattgagcaaagtgattgatacgagaaaacaaagctacaaccagatcaaggtgggagatgaccgccgcagtgtcagctgagcatacgctgactcggttcaacttgcgtccggatagaaattcagccaattgggttcgcaaatcggggatgaccggccagtctccttggttcgattctcacccaactcgaaactcttgttgacgggctcttggaccgggaacgcccgagtatgggacattcccagctgtaacctgaagaccacgtacagaggacacggggacaggatcggaggtgtcgcatggcatcctcaggctacgctcagtcagagcgaggatgccgtcaactttgccacgggcgcggcggatgggttggtaaagctgtggtcgctaggcaggtgagaatcttcggtctggattttcagccagtcaatcctagtctgactttcaccgagctgcagcgaacgatcgatggccacactagaaggccatgaagcgagggtcggtcgtgtcgctttccacccttcaggaaactatgtcggctcggcctcgtatgatgggacatggcgactgtgggatatcgaaaagaaaaaggagctcttggtccaggagggacattcgagagaggtctttgcgctcgctttccaggatgatgggtccctcgcggcttcagggcaagttcttctgccgaacttttcgcttcgcaatctggaattaacttcactccattcacttcgacaggggctgggacgctattgggcgagtatgggatctcagaacgggccgaactgccatggtactcgatggtcacgtccgagagatcttggcattggactttgcgccaaatgggttcgtcacagggtgctagcgttcgctttcgttcgctcgagctgacttccgatgatcttcagataccaaatcgctgcgggctctggggacgactctatccggatatgggacattcgtgcgctcaaggtggcctacactgttccggcgcacaagtcgtccgtatcagatgtccgattcttccgggcagccgacgaggccgctttgatcagtgccgaggatgtctctgtggcagccaagcagggtgagatggacatcgatcagagtggagacaacgaggacaagccaaagccagccggcatgtcgagaagcggtcttttcctcgcctcgtctggattcgatcacaccgtcaaggtctggagcgcagacgattggcagctgttgacgtcactcaagacggacgagggcaaggtcatgagtgtcgatgtcgctggagacggcaagacgatcgcctcggggtcgtactcgcgctcgttccacttgttcatggatgtagattcattctaggccgagtatgcgactccgattgctattcccgaccctgtcgaacggtcgcaatatgtcatctgttccagcattcattcggagaccagggcagtcatggacttgtcgttcgggcgtgcgaattctcatgagcgaatatcgacccctcatgtgtatacagtgaattcacgcagaagaacagagagctttctatacagtatcgatacagttgcagagggtatgatttgtccgagcgtaaaatgtcgttaatggtcgttgaaaggctatggacgagttcagcgatcgtctccatgctgctggcgattcgtggtccgggccttgatcttgtgcaccagtttcccgagtttgcctggcttttcccgctcacccagccccgactcgaaagattctgttgtcggaacgcgcgttagatcgccaaagtctccttcctcgactggacttcggacgaagggtgccgattccaagatttgcccgccatttaatgtcggagaccgatcaaatggtcgcgaagccgttctgagcttggatggtccgttgagcatgttctctggggcggtcatcctagtcggcttgcgatttttcttgaaaacctcccggatcaaggcgcccttttgttgccaagcggaacggatgacatctttgcgaccggcaatgttgctcgagtcaacgtcggcctgaccgtacatccacaacgcgcacactcacctcttcggatgtgctgaaacagattctcgaaagaccatgtcttattggaatagcgaagctcgggacaagtgaatttgaagtcgtataggtcggtcagacttttgggcttgtctccctacgaatgcagccaaggtttcggtcaacgtcccttgcaggcaaacgacggggtttggcatcccgactcaccttgtaactcaacactagcgtcgtctgtacaaagctgatcgacacgaatgtcatgttctttgtcgcccgggaatgcatttcgtctgcttcgaacggtaagaatggctgctcgctttcggcagcagctagactggacccgctcttttttcggcgtacgtgcttctgctcggaatctgcagcaggcatgtctgaagaggagttctggcgggtcaatgacgatccgttctcgcgttggtctcggttcgatttgtcgagcttcctgccatcatgtgtaggtctgagatcatcccccggcccgacctgagtcattccttgaacagtcttgcttgactggtggccggtcgcttgcttcttcggtcgaccgttctcgccaaacacatactccatgagctggcgtcctaacttcttctctagttgtactctgactggatgcaggtctacatgcagtctctccatgattgtgatgcccccaaccggtgcaaggactgcccatcgcactttcatgatcggctgtgcggaatgggttggtgagtctaggccctcagcgcgtcggcgggaacccccagactgaccttgctttcttttgcccctgacttttgatatttcgctagcatttcgggaaagacagcatcgggactgctgttcaaagcctgaagatcctttacgacaagagtactgtcggtactgctgtccttcttcctcagccaatcaaagtgcgtatccgtcatcgccaactttgctagcaaagcgtcttgcccaaacatgtaccaagcgacttctccagcagacgcctggaagcggatcgatcctttgagagctgccgcgcgctcggtgtagttacgatggagcgagacagcatcgtagatcatgttcaagctttccacagatgcaagcagatcccctcgcacgtcgatcaggcccaacttgccttcgggtgtcaagtgagcgtaatgttcatcgtacgctttgataagcgattccgattcccgaatgcgttgttgcaattgcgtcacctcagtaacgtatctaagcgcatcacgcctgtcgaaagagtagacaaaagtgtccatcttctgagatcgctgccgctgttccggatcctgatatagaatcaggttcgtgatcacgttgtataaagcggtataatgatgggagtctgccatcacagcaaaacgtggcacatgcagaacagccagatcctgaagagaggatgcgatgcgatgcgagttcagcatgcgttgctattgcgatgctgtacgactggggacgaacctgtttgtgctgaatatgctcgggaagggcttcttgaccatactgctctcgatccgcagatagatcgttactcaaccgcaactgattaaacttgtcgtaatgaaagtatccgtcggttttgggcaagactcggtcaaagtgcaaagattggcatttggaatctagtagcacctctagggggacgaaagttcgatctcgacgctcgttttggtcaggagaccgcctcgggtagaagccttgtaatcccgagagatccgaatagtttctgaggtaacgggatcgagtcagtctcggcgaaggggacaggtggaccgacggccgatgacctaccgatgcatgacgcgcgagttgacggggtccccgacaaagtcttcgtcgcctatggtataacctttaaacgtagcgctatccatacagaacaggatggtcgagtcctcatccaattcactcgacaaggccagttgaggtccgaaaagcgacaggaaatgacttttggtgaccgtgtactcttctggcaagccagcgtgtggatcggtctcgtgtcccggcggcttcgattcttctgttccgagatcgccttcgttgtgctcaagcttgtcgccatcccctaggaccagcttcaaaagctctttggccacaacattacccgtcttgtctgcgacccaatccagcttgttcggtatcttcggagcttgcggttgtttgataggcttgcttttgactggggcatcggtaatactaccaagctgttctcgcagaactttgagggctctgtacagaaggagcgcaatacgattagaagaaagctcccgacgagcttaaaaggctctcacttgtttgacaggtagtactctaagcctttccgaagtcgacttgagaagtagtacttgagcaatatctatttgcggtgcagttgtcagcgagcgtctaccaaatgtggccttctttcagcgggatccgcaactcacgtttctggactgattattaagaacaaggcgtggagtatagacttgatagatgttctgaaagtcattcccctcagtttcattctcccgactgtccaggtgctcggtggaagattcccgaggactctggtgctctcgagcttcttttgcttctctgtccgcgataaagcggtttaaaacgtcgatactagcttgaagggtcgcggctttgctggacaacgtgttcgaaccgtctctagccaccgtctctcgcgaagtgcagttgcgcaatgcttctgtgaggcgatcccttcttgcttctgccagcctgattcccaccctatgtgaacctgatagtacagcttagcgatatgacgcggacgagcaacatgtcagaggtgttatttaccttcgtattcatcgagcagacaccaatgtgagggctcgcggccgaatttactcgcctccatatccgttccgtaccaatgtcccgtcttcattttgtcgatgacgtctggtcgcagcttgagggcaggcagccacctagaatagtggaattgcggacaagcccctatttcgtacatttcgatgtacggattgccatccgaaggccggtgatcggtatcaacgaagtcgtctggattgaaccatggagcgtcttcaagcgccaatttatcggcaagtgtgcccaccgggtcgggaacatctacgatgtgagaggcatgctttatcaagaagcctttggactgatcttcaaacactgctgacagggctctcagctgcacatcttccaaaacgatatcggcggcgtagaatggcttgtgcttgatcgtgcccatgcgttggagcgcttccttgcgaacaatcttggtctgttctcgctggtgcaaatctgcctggaaatgcttgatatgtgcttttacgccgaccgctgtctggcgacctgtagtccagtcaaccttggacatttgaggatagaagtgggagatgtagagatgactgatatcgaaacgatacttgatcgttgcgagggaccggccgaacttccgatggggaggcggcgatttaggaaacagcttcccttgcctgattggcaaggacatgacatgattgaatagcctgtggataacggtcgttagcatttacccaaccaaacttttttgtaggcagcgactcacctccaccacgcgaagaaatgtgagaaccctttgggtgtgaaatggaaactgctactgtgcgttagattctcgtcccggctttcacccgcgctaccgcgaccaaaggttgtgatcgaaggagaaaagtgtataaagtctgaacggaagccttcgtaggaatcgacaggctataaggtcgaactcagccgacggacgcagatgtctctcacgatagagctaagactcacgcgacccagttctcgcgattgtgcatcaacgactgcctgcgttctcatcttgacttgatgatggggcttgaagtcaaacatccggcatcgccgttctgagagccctccgcggcactcattggagcaggtatgatcccggcaggttcgctcgaatttgaaaccgaacccgactcgaactcctcctacgaatcgcgcgcaagtcttcgtcccacgcctgtcgagcaggctaggtagtttggaggcaggtttgcccgcatcgctgtttgcatcggagtgagttcccgtagcagcattgtcaatcatagcagataggcttgagtcattcgaaagaggcacaggtcagctggcagatcgacacgattcccagcacgatgatgccgcttactcaggaatagagaagaacatctcgtcactcgaaatctgaatcaattcgcgttgctcattggcttcgccgatacgcaatttcacgttgcccatccaggccagaacgaaaccggccccgaacccagtaatgtggtaaggatcccgggaccccttcaaatgaagatgacaaggaccatcaaagtcaaccgcaatgcgccaatgcagtgtaagacggaacttgtcccagaaccccatcttcggcgaagggtctcgtggcgggtgtgtgaacttttcgaaagctttggtcagatcctcaatagcaggctggtaggagtttccccaggtgaaatcggtcggcgcgccggtggcgaccttcattttcatccgcgtgtatgtcttgactggcatcagagtcttggcgacttggaccgtgaggcccgaggcgttctgtccgcccagattttctggcaaaacagggcaagccagcaagacgtagctatcatcgtctgccagctcctcgccagcgactaaagtgatcgaagcctggaagctgtgtgcatcctgcttgtcagaggcttgattgtccgtaggtcgaatctggaatagcggcatagggtaatccctcagagtcaagtctaccgatcgggcccgcaagtcgatttccagcggaacaagcagcgagaagtccgtcttggtcgggaaagggcccgccagaccttccatgtacttgatgatcccattcttgtccagatccaagggcttcaattcgactgtaagcttttcgaacttggcgcggaataaaggagcaaaacgctcaggcggcatgacgtcgattgggagattgtcgtctcggttgcgaataccgaatatcaaagctatcagtagctcttctctcctgttctgggtggcaagagccttgtcgaaacgaattttccaagcccgggcgctgtaccacgccagattgtaggctgcgtcgtgtatgtccctgataccgctggcgtcgaagccccagcggtccttcatctcgtcgagattcgacgatggtaacgggccctgattggtatctcgagctgctgattctagcacggcgactttcgcagcgaaagcctccatcctttccaaacgatccgcctgctcgttcaggccgacgcgccagatcaggttcagcttggtctcaagagggtcgtctttgatttcaaaggagaagtagtcgatggtgattgtcgtttcaggaacgatcttgggcggctgagctgagggtttccgcaccgttacgaattccttcttgcgcatgccttccctgagtaatttgatggctttgaacaatgtgctgaaattcaatactaacttcgagagctcgtatcggaagggtatccggattctgagcgttgcgatactaatattggcgataggcttggtgacgtttgcgttatcgacagcgatttcaaaccggcgaactcggccgaattcttcccatctcccaggagctcttggactgggaacgtagaacatcgaactgtcgatcgaaagttccttgtgcgtgccagtagatgaaacggcaagcgatttgagatcgaagaagagccgctctttcaagggcagcgcgaggtcgcccataatctcctcgacgttcactttcagtccgaagccgattccaccaagtccagaggaactctgttgaggttcaattctcgattcctttgcttcttcagatcgatgggtccgggggaacgcttccagggcaagcagagcgcagtacacatgggatatatccgccgacagctttgttttggcaactttgatcgtggtcgcgacgtccaagtgccccgtgttgcaggtttcccgtagcgtaacgttggcatcgattttgtatatatgaaggagcggtttctgtgcttgatcgcgcaaagatattggaaaaggatcgaccccattcgccagatcgccagacggtttcggctgatcgcgcacgcgctggaaatcccaacctgcgtaggagggcatgcgtgtgcgccgcggaaagaaagtcttcgaagcgggattgggaaccggctttggattgggtcgattgcgatcgttcggcatcgccgcgttgtagacaggaagtacgacaatttgccttgcgagcatggtgcaatgcgctgctcgcgctccttgagtgtgcgcttcgttgtgcaacgcgatggcttgttccgtcgcgtccgcgggtagacggagacggcgtcgagagttggatttgccatccaacttattccgtcgcgtttggctgacatgattgaaggcacaataatccaatatcgcccccatttgcagctgcaaccctcgctgcagattccctctgcatgctgggttaagatctcgactggccaacagcaccagtatgttgggtatcgcgattctgagtcggaagccagacggcagtctagccaatatgggattctgatggctgcgagggtgtttgaccttgtttgatcgaaccggcgacagcgattcaagcccgtgcactatgtgatgaagatgatcttgcgcgtcttgatgccaaagcgtgacctggataccgtcctgaagagccacgttgagagcaccgatacccgattgccaccaaagacacaggtcgtggcacgttttcggatcgaccgggccgcccttgactatgccctctccatgaacgtcgatgttaccgattttcaaaagctcgtaggcgggcgcttctgcgtgcgctagagatacgatggcactcatcgtgcccggtcgtagcgaacattcccagtgcatcgaaatagttgcatcgtcttgcaagaccccagcctcgaacgtgaatgcccgttccgacaggtcgatgctgccagattcgtagggtgtgccatccgtcgatggtccggcatctgcttccaacgcttcgtgtgctgcatcgaaagctttcgcatctcttgcgcgggtcttgcgggtagcgcagatgtctcggtaatccgtcatgatggtcgccgcgactccgttggaactgatctcgagcaaactggccgaatcatcatcacttgagagaatacagaaagtcgagtggcccaaacctccatcgaacaatattcttggcatatacttgatggcgagtttgcccgccgaaccaacgggatcttcgtctttacggacgcgtttgagaagagggcgaagatgagacatcatcggcaccgaggtcttcacatggagacgttccacgttgaatgaagcggcaacgatatacctgttcgggtcatccgagaacaggatttggcaccgtctccattgaggcagtctccaggtcgtaactccgtcgagctcgagattgccaatgtcgaggacttttcgcggagggcttcggtcgagttgccaaatcaccgaaatatcggccaccgaagaggaaaagtgcacggcgggaatgagcgcctcttggcgctggttgcgtccaaagatatccttcaagcgagaattcgaagacgggctagtcgatcggacatcgacgaagaacccgttcaccgcaaagtcgaagtgtccggaaacggccggcgctgtcttctcgtaatcatcaggttctagttcaatgcgggcagtgctgtaaggcagggccagttgtaccgaatgcaatgcgttcaagaggtcctgcaagggcaagaagagctacagttagctcatatgtcttcatctgataggagcagcagtactaactctgattctggcttcctgggcggcgggtcgattccgcttttgacccgagcggcgagggaaactacccttcaaccgttcctgcaacgtcagaacccggaggatgttgaccgacactggcgagacgttcaacttgacgtcgacagaattttctcccaaaatcccagccttgtcaccaaactgtaccgtaacctctagtcgactgtcatctacgagttcaaagactttctcgacgtgattgctcatggtcgaagctggcgttttctctgtcaatgagacctgtcccatctccatggtcaaagtcgcgttgcctcgagctcggcctagaagcctcgacagtattctggcggggcggctctttgtgatgcccggggcggcgttgggagtgacaggcttttcgttggccagagcttcgagggagggtggcggactgaggagaccgtgattcgtaacgaaattcgggcttcccataggtgacttgggctcgatgaacggagaccgggggccgctcggagtattgataccagcataacaagctgcatccggacgaacgatcagctctggagcttgatcaaagatgacgtcgaagcaagcattgaaccggtgcataacgaattcgatgggcggctcggagccttcttggtaagccaggacggccttttccactctgagatccatgaggtgtgccaaccagggactttgttgtacagccagtgacatgtaaaagacggtccatgcttgggcttttgccttgagcgtgcccgtcaatttggcctgcaagtgagatcggtattgtatcgttagctatccttctctgctcggtgacatgacagagaatccgactcaccccccacgacgtggacctccaaccagaatccgacgagctacgacttctcgtggtgccaactccggagctctcgttgcgagtctcggtcgtatcagcctgacgagcttgatcatccttcgtgacgtaaacagtcaatccctcgaccgagatggtgagcaaacctccttttcttttcgatctttggagaccgatcctctcgatcttcaaccgagatgtaattgtcctgtgcgcgttatttttgggcgaccattcgattcctcgaacgcttcgagggctgacagatcgaatttgcacctgcagcagactttccaggaggaagggtacgagaacgtatcgcaagatgaaggcggcggctccaagaaggaacaagtagcccaagccactcgaggtcgtcatggtcgaattgtcgtgattcgatctgggctagatcgacctggtgattcgtctagatgatcttgggttaccggattttggtcgaacctccactttcaggtggtttcctaatcctttatgttctgatggcagctacttgcacacgcatgttctttgcgactgctcgaggtatccgagttgcgaaaggtgtgtacaatattgcatctagcagtatcttggaagtcgagatgacgacgacgatggctacgacgaggaagagtaacgattcggtctaaccaagtttgggtcctcgagtagagtgagtagtgaagcctatgagtaagatcgttaacggcaggcagaaggggagggggacgcggccggaggttctaagtcgggcgacgagggtttagaagcaaagcgtgcgtatgccgtaacggccggaggccggcgggaatgctggacgggatcaaatgtcctttggacagggttgaagatgacacgtcatctttcggatgcatctcgaagctctcaaatgttgataacgaagttgacccctgaccatctaatcagacttgatagatcttgcgaaccgtcatctaggtctgcttctgcactcgcggccatctagataactcttacagccaatctgatcctcaaattttgatatcgacttctcccatcaatcagttccataaagctcggattccactcgttcgccgctgtagaagaagacctgccaatccatcgaactcgtacgccggccgtcttgaattcgcggcgaacacgatccaactggcaacccgctgaccctttgttacttgtatcacggaatagactctcgccatcatgcccatccgtccaatctctatccgacaaatcccgaccaacctcatccggcctttgcaaggtgtaccagcgtccacctcgctctacaagcgaagacccgaacctgccaaagctctcctcgccctagggtcggatctgcctcctaacatccgggtacaagactggatccacgatgaccgacagcgatggagcgggatcgcacgggcggatcgagatggcgtgtacgacaagaggacgaaacgctgggtgcggaagggcttgaagacgttgttgagggaatactagacggcggccttgtgggacagctcggctgggctgtcgatcggtcgtttggccacgcttagcagcccagatcagtggtgcgttgcgtagctttgtaacagtacagctgcggtcacttgtatcatattgtacaaccatacacgacttcgcccgtcgtctaagcgactaaacgataacaccacctctgccccacatcagcttccccgttctatcgagcggggtttcccggcagcagggccgaatggtaggaaagacattctcgaatgtacatcttctcgcgatctgttggaaaagcgattaggtatgagcattggcgcgaattcgggcggtcggagagcgtttcgtccggacgcaccgcctggccatctctcctcgccatgtgacgtcttcaagaggtcctgatgccaaggcgactccgggaacgaataagaagaacgataggaccgcctcgatgacgatctattgcaaaacgtgcccgatgagtcttgggtggccatatccgagcccagctaggtatgggattgagagcttaccgaggttgggatccgagcttctggcttgcccatagctttcagaatggagaggtctaaaggttgtcgacaagaacaggtcagcatggtagctatatcactttaaatgcttagactagacttgcgctcataggtagaataggcggctgcgagcgacaatacggggtctgattcagccttgttcacgatcgagcgttcatttgcggctcaccatgcagcagcagacaggtcgcgatgacagccagaaccttgcctatcatcgtgtaaagtgtagcggtccttgttctgaatcgtcgacgaactttggatagctatacccctgaaactcgatcgccaatgcccataccatatctaccaacatgttgaccatgcatgcatgatgatgatgatgctacacctggcccctgtcaagcgcgcttacgagagaattcgatgcgcttctatctgtgacctctcacgcgagtttgatctcgttttcactagctcacagccagcagccagcagagtagagtagtagcgtagtagggcgcggtgacgatagcaagctcggaggttgacgggaggaggcagaggagagggagccacctcgacctcgctaacccgctgcccgttcgggttcaacactcaagcggtcacatcatagagtccaattcctgatcaaacgataccctttgctggcctccatcttctcttaaatctcatcgtctctcttacctagcttttggatacaaaacgcttagaacatctcgtcaaacgtttcgccgagatcatccgacacgtcaaccccgagcgtgcgcgcatctctaccaattacacctgaagactcggtcaccttttccgattgatcgcttcaaaacctttgcattaggatcacctcctcacaacaccgcactcttcttctttctcactccatctcctcatcaaagtcgtgccctgatcggtcacgtacagatcaacccgcaatgtcgaaccctacctcgaaatatgcgtcgcagttgcagatgctatccccgctcttcccagactgggatgaagatgccctcgcttcagtactggcagacaccaagggaaacgcagaggaagctgccgtgctgattaccgacggtaagtcgttgaccctcaacctcggaggttggacgaaagacgagctcacacggatcgctcatgctcgaccacgaaccatctcctggtatcgatcctcctgtgctcctttccgaccacgtcaggccgagcaaccaagtttaccaccgcttcgcgaaagaaggaaaagaagccaactgcctctaaactgaatggtcacaccaacggaaacgccgactcgggtggattcgctaccggcgactcgaccggattttcgggccgaggaggattcaggggtggacgaggaggcagtcgagggggacgaggtggaagtggtcagtcgaatgcatgcgaggctattcctttctacgacggagatctgacggggctcgacatttcgttcagactcgatccgaggagccgtacgtggtggaaggggaggttctcgaggtgggcgaggtggattccgtggaggtcgagccgccaatgggctgccagaggacattgtggcagaacagtcgacgtctgcatcggcatggggttctacagctagagaagctccttctagcgaggcccctgtgacgaccgaagacgcttggcccgccgctcaggccgagactgtggctcccaagacgtcgaacaatgaagagtttgctgcttcggccggatggggtgatgcacctacaaaggccgagacggaagccgcattggagtcggctggaggttggggcgatgcaccatctgccatcggagatgtgcctcctgttcccaagaaggctgctaccacgattcccaagggagtcaagctcagttgggctcagatcgccaagtacgtaccgttaccgcgcaagcttctgaagcctagtgcccagagcgattccgtactgatccatcgcgacctggtacgtaacaggcctcctcccgctcccgctcctgcacccaaggccacacccgctcctcaggcagcccctgctcctgcacctgccgccaaatcttccgagcccgagactgccgctgtgccagagcccacccaggaagaagaggcccaaaccgagacggtcgaggaagtcaagcaagaggaaatcgacttgtcgtctcagcaactggatcagcccgagatcgtcgaatcgcaacccgaagtccccgagcccatcgaagtccaagaacccgagcccgcccagactcaggaagatcctctccaggagcccgaagtcgctgcagccgaacctatgaaggacccttgggctagcgtgcaagctcctccttccgcatgggagcagtcgtcccagcaggtcaaggaaccttctgcacccgccgttcccgaagccagcaagccttccacggattcttatgccggacctcctggctttaaccctgccgtcaaggccgccatcgcgcctgtcaggaccaactcgcgtgccgctctgcgatacaagaccgacaagcaggccgtcatgttgcctggatctggtgccgccggttccagcaaccttgacatgaagttcggaagcttgagctttggcaacccggatgctgacgagcaagagtgagtcgcttcgtttgctgtgaaatggtcagaggtcaggaacgatactgacaccgttcccgttctatcctccaggcaaaccgagcctgctcaagaggcacccgtgcaacagcagcccgagccagtcgttcaggaacagcagcaacaacaagaacaagtcgtgcccgcagctgcatcggtacagcctactgccgctatccagcaacaatccgcaactcaatccgctccctctgcccagatctcccagatggcctctcctgccgtcgctaccgcccaacaatcggcatacggcgcgacttcgggatactaccccttccagggatacggtcaatacggacaaacccaggctcaacaaccccttccccagcaatactaccagcagtccgcaccccagcagcagcagcagcctcagcaacaacagcctcagcaagcagcttctgcatccccggtcgtcaaggagtcgcagacggtttccgcgagcgagcaacagggttccgctcaacaaggctactaccagcagcagcagcccaccgactaccaatctcgttatcaagacgcttatggccagtcgcaggctcaacaacagcaacagcagcagcagttgcagcaacaacagcaacagcagcctgctcagcagcaatcggcttacggcaactttggacctcaggctgcctatggatacgcacaggcccaggtgcagcaagctcagccccctcagcacgcttcgactcccgatatctactctaccgaatctcagagggtatgttcaatgcacaatacgataacacttccacgccgatcctctgactaaccaaatggcttgccgatctcatcagtcgcagcaatcgttgtacgactcctacgctgccagtggataccctcgacaggctagtcaggaagcccccaagcaggctacccctcagcctctatctgcccagacttccggactggcttctcctgccgcccaaccccagcagcaggctcctggtggctactacggtggcggcgtcggtatgagcggatactacgcgccttacaacccttacttccagtgtgagtatgagtgtttttagggcggaaaggagtgcgaaggaatctgaaccacgaaatttttccacacagacgggcaagctcctactcctggttaccagtcatactaccccatgccccaggccggtcgtggtccctaccaaccagcccctgccgcttcctccggtcctctgatgacccaggctgctagcagcaagcccggaaacactgcaactgcgcagggacactacggtggacagacatcgagctacgacgactcgtcttacctcgccagatacggcgatagcaaggcctcacagcaacagcagccattcggctaccagtctcagttcgcctcgcaaaactaccttggtacccccactcctcccacttcgcttcctggcgctgcggcttcgacccgcgccggacaatccgccgacgaggacccttacaagaccggcgtcagcggaggcatcggccgaaccaactctgctaccggctctcagtcagttcccagccagcagcagcagcagcagcagcagcagcaacaacaacagcagcagcagcaacaacaacaacagcaacaacagcagttgggtgcagctcagcagcaattccctagctacggctactccacgggataccctcagcaaaacgactgggctcagtacgctcagtaccgtggaggacagcagggaggatactggtcctaatcacttcgcgatgatatggcggagtgtgccagtgtcatgaaggtgtcgatgtcaggttcacgtggcggaaggcggaaaggctcagctattcgatcgttcattactttgtgcttcatgaaaagcgttcatcaaacgcctcttgcaactgtaatacaataacacaactgacgcagtatgcgccgtgcccattcagaagccttcagacggtccatgcctgtgaaaattcaggagccatcttgtttcctgcgtttcctgacgatcaatctccagcccatttagatgctcgcgtgtttttgcgcgtcgaacgattggacgcgtcgacgcgtcttctctcgggatcaagaggggcagccgggtcaaagcagcttgctatgcgatcaaagttagatgtcatcccactccaaacctttctcatcatctgtgtttgcccaatccacaacaacattcttgacgtattcgagtagctgtctctacagatgagtaccaagaacgtgtccaaggcagacaaattgcaagcgctccgtgcggtacgagctggaggctctcgcttgaagcaatggcaggtgagtcgatgatcttggatgagaagcgatccaaacgttgagatcaacatgtgatcggatcgcagccagaggacgccgatttatacgacgaagttagcgaggaacaatacaagagcatcgttgggaaacgtcttgccaaggacgacttcatcgaagatgacgacggttctgggtatgcagacaacggaatggacgtctgggagaatacccggaacgagagcgaaggatcagacgaggagcaggagaagagatgtgagcccgatccgcctggtgggtatgggtgtatactaaacatgaaagtcggtcgatcagcgagcaagaagacaaccggacggacagcaaaagccaaacctctgccaccctcgaaaccctcagcgtatcgtcctcaagtcactgaagactcggagaatgactttatggccgatctgctgggtaccgttgagaattcctctccccacatcgcttcgtcctcacctctccaaagtggtttccgtcggaagagaaagaactcgcccggagatgcctatgatagtggctctctgaccaatccatcttccgacggctttgagctccccagcagcgggccattgttcagagggaaccccttgagtgatgggccggacgggcgagatataggtctatgggagatgcggaccggcgacagcgcaaagaagcctcgtttgaccgtcaaggccgaggacgttgaaacgcccagaaacgctagaaaaggagtgtcgttcgcgaccgacagggacatggacgatggtttcgatgtcggagcggatactgccgtcaaatccgaggaggtggaggaagaggacgatgatgaggatttcttggtccgatcagatcgagccatcactgcgaaagcaaaccagagcaaggccagagaccggctcatggctgcgatcggcgcgggcaagtcaaatgacaccacaccgaaggctgcatctacaaagaccagacgatccatggtaaacggttccgcaatgtcggcaaagctagagttggagaagcaggcccgggtcaaggcagagctgcttgcagcggaaacagaggcagagagctcttccgtaaccaaaccgcacggcaactccgccaaaggtgcagcagaaagacaaagctggttgcgtcttcaagagaccttgaataccggcgggttaaatgacgattccctgggatcgccattcacggctgcggctgcggctcaaaagaagtatactccgagcctgcgcattgacgcgtttgaaccgcttgagtccgatgaagcgtccggaatggatactgggagcgatggcgagcattctgacagctcgatcaaagcacggcaggatcgccgcaagaaacgcaagaccggagcgcaagacgagcccgacgcggagcgtaatttacgattctactggctggattatcttgagcaagatggtgtcgtccacttgctaggcaaagtttttgatcgcagcgtggagaaatttgtcagttgctgcgtcaccatcactggaatacagaggaacctctttatattgcctcgcgaaagacggctaggtgagtcgacgagtgctgcttttcaatgatatattgccacgctcatccgattcactgcagacgaggagtttgagactgatcaggaggtctcggtcatggatgtacatagggagttcgatgctctgcggcggaagcatggtgtcgagggcggattcgggatgaagaaagtaacccggaagtacgcctttgaacagcccaacgtaccgaggggggaggcggattggtacaaggtgatctatggatacgaccgtacgtgatgcaatgcataggacggtagacgaagcatgactgcccgctcatgctcgacactttcgatatacagagccacagctaccaggggatttggcaggagccactttcagtaaagtgtttggaacgaataccagtgcatttgagatgctggtcatcaaacgaaagatcatgggtccttgttggttggacgtgaaaggttgcgtaccggttacacagaaacccgtatgtgtcgtcaaacacaaggccccaacgtctcttgaacgatgcactcactctaaagattacttgcagacgtcttggtgtcgattagaagtgcgagtcaaagaaccgaaaaacgtcaaaccgttctcagaatcggatgcgtcagcacccaaggagattcccccgcttactgtgatgagtatcaatgcccgaacgattatcaatcacaccatgaatacacaagagctgctagccatcagcacagctgtgtgggaagattgtaagttaccccagcgattgcataacgggaaaaagagattctcactgaattatactgcgatacgtcaacgcagacaatattgacgatccgaccccggtagagaaactgcgtcacgtaccgcagacagtcatgcgaccgttgggcgaaaagtttccacccaattttgaggcgagagctcctcatcagcaaatcaagaccgtcaggtccgagagagaagtcctcaatctcactttgagtaagtcatgatcggttcacaattatatgattaatctgctgacttccctgcccacggctcgtagtccagattcaacgagcagacccggatgtcattgtcgggcacgatttcttggggacaacccttgaagtcttgttgactcgaatgaaggagctcaaggcggatcattggtcgcgtatcggacggatcaggagaacgcaattgcgtgttggcaagcaagcctttggcaatgccaaattcctggccgggcgcctggttgccgatctatcgagtgacggtgccaaggtaggccgtcggagaagagagaagcgtcttgcatcatctccgactgaacgtgcgttactttgcgttatcagggcatgatcgattcggtcacatggtcattgacggaaatgtgcagcactcagcttggcttcgtgcgcgaggacatcgatccggacgatacggcgggatactttgatgggtataccgtgtcgccagaccggctgttacacttcatcagacacttgcaaatggatgcgttcgcgcagatggcgatcacagcgaaagtgcaattgttgccacttaccaaacagctgacgaatctggccgggaactcctggtaagcaagatcaatagtgagctcgagctatagccgagattctcatatttgcgacgcaggaaccgaacgatgactggtgcccgagcggagcgaaacgagtatatcttgctccacgagtttcaccgcctgaaatatgtctgcccagacaagggagaaggtaaaccgtcttcaagatcggccaagaagccgaccttcgacgccgaaggcaatgtcatggtcgaacccaagaagaacaagtatcaaggaggattggtcttcgaacctaagcgagggctttgggatacatacgtcatggtcatggacttcaactcgctatatcccagtatcatccaggagtacaacatcgatttcacaacagttgaccgggacccaaatgcggtgagctgcgaaattagactagatcagaagatggtatactcactgggaggtcgacaaacaggacgaggatgaaattcccgatgtgccttcagccgatgtaccacagggcgttttgcctcggttgatcgctactctagtcggtcggcgtaaacaggtcaagagtcttatgaaagattcttcgacttcccaggtcaagatgatgcaggtacgccttgtctctgttggccacaggtacggatctcattgacgacagaaaacccgccactttctcgcagtacgacatcaagcaaaaggcgctcaagcttaccgccaattcgatgtacggctgtttgggtttcgctggatccaggttctatgccaggccattggctgctttgaccacctttaagggtcgtgaaactctgacacagaccaaagaagtagcggaggggatgacgttggatgtaagcgtcaactagattccgccttgtcagcaatttgagtgctgaaatttcaaacgacaggttgtgtatggagatacggattccgtcttcgtcaactccaacgttacgacttatccggaagccctcaagatcgcaaacgaattcaagaggaacgtcaacgatcggtacaagttgcttgaaatcgatctagacgcagtgttttctcgagtgctcctgctacagaagaagaagtatgctgcagtcaaggtatccgaaaacgggacggcgaaaacggagatcaaagggttggacatggtgcgtcgagaatactgcaagttgtcgaagacggtatcagggtaagtcatcctagcttgctgtcaagtagaaccggccgcgacgttaacatgcggacgactcatagtcgagtgttggacgagatcctgtccggcaaagcgactgaagacgcgatcacggagattcacgaatatctcacgctcatcggcaacgatctgcgagatggaaagatcgatcttgatgaccttgtcgtcttcaaagtaagtctcaagatcttaatacttaggaaagaccaaatgacgaagtcagccttcatcaatagcgtctaagcaagaaccctgaagattacaccgacaaaaagtctcaaccacacgtgcaagtcgcgcttcgaatgaagcagcggggaggagttgggaaggcgggagaagtcattccctatgtgttctgcctgggggctgatggcaagagtgccaaaagcgcccaagcggaccgtgcattccatccggatgaattccgccgaaaggattctggcctgaagattggtaagtttgcgggaaagacagtcatagccactacgagtcaggcttacccgctttgctactagatttcgacttttacctgtctcagcaggtgcttccgcctatcgagcgactctgcgaggagattgagggcacggatcgctcgcgcttggcagaatgcctcggtgcgatcaagctccctttgttgctttagtcaatcaagctaattccttcgcggtcccatggattccaggtctcgaccccgctcgttatcacaagacagccatcgtgtcgacgcacgacaaggagttctttacgttccaatctcagatctcggacaaggaacggttccgagactgcgagaggcttatcctgcattgtagaggctgcaggtcggatcttcctatgttcagcatcgcggaagacattgatatggtgagcacgatgctaaattgagccggactagagagacgatggtgctgatattaaaatcgttcgggccggtagaccgctatcatacacaacgaaggtgtcaagtgtccttcctgtgcgaaagtccagtcagccgccggaatagccatacaggttgaaagccatatccgagagcacatcaacaagtattacgacaatacgatgatttgctcggattgcgagaacagaacgaggatgatgagcgtttacggacgtcgatgtacgtcgaccgccaactgcaggggggagatgcgaccatcggtaagtcaaagccgtcggcatctcatggaagacgttccgctaaagactcgaccgaaccactgccgcagtactcggatgcgcagctctacaaccagctgctatatcttgcctcccttttcgacgtagagaaagcggtcgaggtcagcaaagggactccccgggccggtatgttagcgaggggatagcaatggattaatacatgtgctgatcgatgctgctatccgtgatcgtgtagaggagatcaattccctagtcatgcacaaccgggaaacgttttccgagatcaaagcaatgatcgattcttacttgaacaagaacggacgacgttatgtcagcatggactcgttgttcggtttcatgtctaggatggctctttgaacgacattcataatgtaaaatcgacagcgtgactctgtgcttgtcttggtgatgatgaaacaaaccattgtacaggtctccgtgcctaatttcttgtatcattattcatagcaacattagataggctgtgtcccttgatctgcactatgctttcaggggttcggaagttcccgtcagtagcgcgatgtcgcatcatattgtgtcggacttggttgaaaagcggtgcagatcgctaaattgatctaaacatatcaaagcgtataggaaacaagcgccgcaggctttctaccctgcatcatttcgatcttctgaccgatcatctttgagaatcgcgagagtccaaagtcggattgcgccatggtttgatcagcaattccagaacaactcgctcgacggacgaattgatcgatgcatctgatcgtcagtttacgtgtgcttccagtcaggacagaaagtacaaatccgcatatcttcctaccgcggtctagccttgtgacttatcggttgcttcgaaagttcaaagtcacctcgactaatcaacgactcagctgtcccaccgcgcgctcgcgttccaccatgcgcgttttcttctgagtttccgggcaatttgcctccggccgatcagcttccacgtcgaggccgaggtgcgagtctagacttatttcgagcttccacgtaacgtctcttagctgtgttctatcctttctttctggatgcacacatcatctggttcttatataggccagcaattcctgcaagcgttcacatccgaactattacagtctctatcttactccatacaggctttctatacgcaacgccaagggacctcgaataaggcaaagagtcgacatgggcgttgcgagaaacgacaagatccgcttgaactctatcaagacggtgacattccgtaaaaacgcagtcacaaaatcgagaaggaatgaaccgataggcgagtcagcgagactggattgcccgcagatgtgtttcttcccggctgacaggagtatcatcttgttttctgggcgacccgacagaccagctcaattgcaacgggaaagcatgtgggctttttcaacccgaagtcgttcagtgcacaagcatgggagatgatgggagtggtgaaatgcaatggaaggtaaggcttctcaagtcgtcgaaaggttaagaatgtataataactgggcatgagcgtccgtgttttgcagtgcgacaccgatctaccttcgagcttgcggctcggcgaggtccaagtctcctgcgaaggatggagtcgaccgggtgatactttcgttgttaaaggtcagtccaaccatgttctacgctttctacactgccattctctaatcgatgctcggctcgcatctaggctcctgtgggctcaattacaacttgattcaggtggaccgtcgacttgacgaaggcggtctgcatgatttcgctaggggccggaacatggactggcgtgagttgatgagagcccccccgcggggtggggatttagagcaagcacgtgaatttacgacctgtcctttacagccgcaatactattctcaatcgcattttttggaatggctttcgcaatcatctactcgatcatgagatcttgtctgcagcgacatgcagctcgttacgcacctcgaccactttccaacttttggcctggaggcggcggtggtcctggtggccccggtggtcctggcggtggtggacctggttccaatggtggagctccccctccccctccatattcgaaagacccaaaagcggatccagctcaagcgaccgatcgacccacctcttcgccgtccaactttttgaccggagccgctctcggaggcgctgcggcctacctgttgtctggaggaagtcggaaccgcaataccgagaccgagtgggacagattcaggacgggagcaccgctcgattggcaagccgacgagggtacgagacgacgtggggagtccagtcgtatgggtgcggcacggaccgacagcggtggtctaggcgatatgagaattgcaacgggtttcggaggctccagcgttcgctgagcgacgctcgtgttgatgacgggcgagacttgtgttcctaaacgtcggcaatcgatccgtcagacacaagcatacgacatgttgttgagcggtacattattgttttcattatgattgtgcgggtagaagcctgccagctagccacaagccgcgagctggtagatgctagatcctagaccgatcgagttcagcgttattacaacctgaaatagctactctggcctccctctcctctaaatctctagatgatatcgaaatcagggtttcggttcgagcttcataagagcgttcttctttcggtgtgcctgtcacgcgggactctagggattggagtgggttttatacgttcaaacgccggattggcgaaaagctctccgacgtccgtcgatccgttgccgcgtcaaaggttggccctttctctcggacagaatggcctatgttgaagcgagtttggtccaacctctaggacgatccgccttgccgaaacaaccatccaaattctgctccatgatctcgctaccatactaccatcgtaacgaatcgcgagtcgaccatatgtgcccctcgttgaaaccgcgtgctcacatgccatgtgtagcgcggctgcccggtcgcgcggattccaccccgctcgaatgagtctaaaagatgacatcatcgatcgatcgcgcgaccacgggcacgggctgaacccataattcgccggactctacggtgtctaaacgtccatcacgatcgcatgagagagtcgaatcgccgaacgcccggatcgcatactggtatactgaacagctgagaacgtattgaacatctttggaatgacaaccgaggcagggtttactggtctaaccatgagcgacgagcccgggaagatgcctctgtttgagtccggctcttgtgcgtccgttgatcatccatcgtttgatcacggtggttcatcgccaaggccgatcggcggggggattcgtcgctccaacaatacgattcccaattccctgttcacaaaacgccacttcacacgacactcgttgtcccgagaaccgagatcatatcttgtctcgccacgttcgctcccgatgagctccatgattaagcaacgtcagaacgaccagtgatttttcgaccgtttcaaggtcgtcgtgaaggtcgatcgagacttccgccctttggcttcgtgctctggtatctgtcacggcaactcggggctagtcacccatcccctgcatcactcatcgaccccggggcttctagctcgtacacgtcccgaccggcgctagggccgcatcgatccagacagaaccgaatctctgccagctcccagtgagagagagggggatcaaacacctttttttcctccttgcgtctcgtaacctcgtctttgctcgatcacaccttcacccaggaagactcggccatcgcatactgctgtacacagaggcttgacccaacggcttgttttgcggggaagaatctccgtcgaatgcaaaactcgttgcttgaggtcgagctcgtccccgatcgctagagacgcaagatggggtctgatcacgccctggacaggggctggaccgacatcacgagcacagtgcagttggaacggtcgatgcgatcgacctctgtgactgcaccaccatcaaacctggaggacgggaaaggcccgagagccacgtcgtcgaggatagatcaagcacggctcgtcgatcgacctaccgggcttgaccgtcaggattcagacgtctccaactcatcttctacgggcgagctgttcgatatggatcctctcaggcgtgatagcgctacgacgatcgataatgaggaggaacccatctctcccgtcgccgatggggattccttgcttcgacccgtcatcgtgcgtggatccccatcggacgaacaacgatcacagacggtcctgggaggcaaggatcgacaaccggacggcctggattccgtcgacaagggcgtcctcacgcagggaatagagatggtcgaaagcggcatagagaacttggcggcaaagtggaagtcgttcgggttcccaggttccaaatcaaacaagcccgtggaagcggatcagcagcaacaacacgcttcgggctcgtcgtcccggacgagaccgcctgccaccaccgactcggcgagcgatcatataacgaccataacgacatcctctcttaatgcgattggaaggaacctttcgccaaatcgccatcagcaagttggtacacttacgcattcgaaccgacctcgtatccccagcgcagaatttcagcatcatcagcatcatccggctcattaccatgacgcctcggatttgacccctcgggcagaacacgccccaaattattcaccaaagagcatggccgagacgatggtttcaccgacaagccgtcgggagatgcgaacgtcggctgaccaagaggacgacgagaccaacgtctcgtcgtcgtcgagaaacggaacgatcaaacggaaacgcgattcaaccatcagaaaaggctctctcatggctagaggagaccggacaaccgataaaggcctagacgacccagatcgcaaggcttccgttcccggcgggtatttccccgacgtgaacgaactcaagcgaaaggccaaacagcagcgtgacgcggaaaaggcaaagagaaagagcgaagcattagcaagacgggctcgggcgagcgctctggcgaattttgctacatcccctcgatccggctcacccttcacctcgcccaccgccacaggtagcgattcatggcgaacgaacagcaggagtgaaatcgagtctgcctcggatagcgagaactcgggaacagacgaaatggaaacgccttggccatcgtcagctcgacatggagatacgccactcggtctcgaacacgagatgaccaagtcgtcccgggcgaattcactacgcgagcggatgaacagcatggggtccatagaggagaaacacctgagctcacctcggtcccgaagagacagcatggaccgtcggtcgtcttcagagatattgaccgacgaggacgaggtcttgcaagcggggactggatgtaccatttccaaccccctagcgcctccacccgggtatcccctttattcacctcagatcggttccgacctctcggacaggccttggctacgcacgtcttcgtacgccggtagttcggccaataacagcccaccttcagtcgcaaggtcgcacagctcgagccaggccttgccagcacagcaatcacggaccccgtatggccaatattttggctttctgcctggcggcgttcactctgcctctcagggttcatcagcgtcaagcagcgggcccgagagcgatcttcaaaggagattacataaccgtttcgaggtgaccgacaagggcttgcctgtcgacagctcgagtcccgcatctggctcgagtccgcacaacggacccagtccgagcgactctccccgcgtcaacatcgattcggaagttcaagggtcgtcgccatttgagggcaagatcacgatcgataccagtccggaccgctacgtcatctcggtcggagaaatggccgggttcagcttggaaaacatcacgatcgcggtcaagagcatcaatcggtcgagtagctcgagcagttctgttcctcgggcgggactggtgcattcgcactctagcgatgcgagctcgattcattcgcagtcttctgcccgctcgagtgtatcgttccacggagccgacaagcatactgtacagaggacgtcgtctcccgatgtcgtacatgaaggcaaggtgttgcacctcatcgcagaccgatgggaggattcaggtaggttcgaataacggcctcgagaatcggacgtccatcctgatttatttgctttcgtgtaaagctcacttcgagaggaggatcacgtttggtaaagatgccgacttttcgaatggggtcaaagccaaattcgacgggaccaagttggttatagatggtaaatggatactcgcaacgcttgttacctgtgagacgaacacgactgatcgtttcatatcacccatgcagtcgtccgccgggctcatcctttcgcgagaccgtcctcgggacgcgccagtcttccgccagattcgaacggcttgcctcgaccatccttttcgtccgagacgttccacatacccaagaacgtgcccgccgcgagacaccatagcatcgctttctagaccacaatccacgcacacgctgcaggttcgcatggatgtattcattcctggcttggccgacttcttgtcgctggctttccggctcactgtatcgaccgcaacatgtttccgaatggactatgactcaatcggatactacgtacatgtatagactgccgggacaaaattaccctagtgacctttgtttgtaaaataggaagcagccttacgcagcggtgaggtagatgaggtccgagccatgacgacggatatgttgatgatttcatgaaccgcggatgatgaactcgaattcgaattaaatgatgaccgcgcgaggcgatgacgagagttgtggttcacggttcgggatgggcgcgagtgagttgtcgtcacactggcaccgagttccccatcatattatcgtgctgatgtcctacatagctacatcatcacccttgtctaatttacgctcaggcacgttttgtactcacgacgtctccagacttggacaaggatattctatagccatatccagatttttccaccttgaccggctctcaccaaccatgtccgcccccgtctctttatcgaatcaggctctgaaaccgcgcaaaaggcaacctcacagccagcaccgtcaaggcatgtcgacgagttcttccagagacgctagtggtgaagtaagtgtcacgctttgcaaccaaataatcggtatgaaggtgtctgacttgtctgcttacgtgcgttcaggaggattacgatgatcctactgatgacaactcgtcaaccgttggctctgtcaagccttcagcgagacccgctattcccccatcgcccctgaagtctgctactggaagaaagacctctggtacagcagcaatccatcccagggtagctgaagtcagcgacgcagaattctcggaagctctggactcgcccacgtgcgtatcaaacagggctggtccttctggttgtgcgagcgatcaaggctgacggcaccggttgatcacatagctatgatggggatgtcgagtcgacgcacttgccgtcatccttggcgcaggctcatcttcaggcgcaacagaactctcgggctcctcccgttgcaccccctctgagcacatcgtctaccgatacctcgctaccaggcgatgagcgtgtcagacgagaacctacacctcaggctcgaaaggtcgagatcggagatacctcgccccgggatgctatcagccatcctctcccgatttcaaacgtcaacctcaacctaccctccagccccgcctctcacgccttgagacctaaatcgtcggacctcggacccgccaaaatgaccacccctcccgagcacctgtccgtagaaaacatcagggcgttcgtgcaaagagccatcgatgggaaaggggacgttgatggggtcatcaggacatggaaaacgagcgagcccgtcacggaccgcccggtccgaatctatgctgatggagtatacgaccttttccacttcgggtgagtcacctgccggaagcatctgggactgtcacacaactgaacacttgctccgcgctattccagtcatgctctccagctcagacaggcgaagctttccttccccaacgtgcacttggtggtcggtgtatgctcggaccagctctgtgccgagtcaaaatcggcgcctgcaatgacccatgcggagcgatgcgaggctgtctcgcattgtcgatgggtggacgagatcgctcccgaagcaccctgggaagtggaccaggcatggatagaccgatacaacatcgattatgttgcacatgatgagatggtttatgctgccaagggtacagtggacgtatatgatttcgtcaagaagcagggttcgtaaaaagagtctcgtaaaggttatcgttaaagggtttcgtaaagttgatgattcctcctccatcttgcacaggcaaattccttcctacgagacgaaccccgtcaatctcgacttcagatttgctagaacgcatcgtccgagggtatcgcgatggtttcttcgattccaagctcgaaaagaatggtcatcccgagttgatggcgtctgatgtcgattgggactctagtgctagtcacagcgcagagaagatcgctcgtcgaaggaatgcaggaaacaaacattcctagaaggtccggttccttgtatcatttgcttatcgctccccacccgtagatttgtaaccgtgacgaccatgtgcgaatatatcgagggctattttttctgtgtcgtcctccttttttcggaccagaaaatcgagtgctttttcttcattgttttcatcaagtcggcccaatatcgatgacctatcgtccgattgccagaaaatccttgcgcattcgagagagtaggataatggccgaccaagatcagagactggacaggcggaagcaaggatcagcttggtgcccccctcaaaagtcggaagactgcgcggctctcaccctttgagcacgggtcaacgcgacgttcaatctcctccagtcgtccataaagcctatagcatgtctgggattcgaccgggtcgttgagaatacgataatctttttctcacgaccttcgaacccgtcgactgtactgatctcgacagccaagggagtgttctttcggtcaccctccagaagatgacttagatgctctatacgctgagggtcatgtaagattcgttcaatggctgcgatttgaccggcataaggagcgatgatcccaacgtcagagccctccaggtcctgtatcgaattcaggatcagtcagagatttgtgtgatgaacctatatttcgtgactgaccgggttattgatcaagatatcgagaactaccgaggagacaatgttggcttcgccctgattctgaatactgcccatgtatgcggtttctgattcgtcatggtcgatgaacgtcatgcgatggggagcgccagctctgtccaaggtctgaaattcagtgtcgggcgtcttttccaacccaaagcgaagggtgccgtcctcttgaatagtgccatccatgaggctgttattgtagaatttctcaattggaaaggcggatatggcaggatgcattcgatactgcgtatccaacatgatcgtgggcaggagacctagtatgcagtcagagagtcaggagcaatgtcaggcgccgatacgttgctgaagggtactaactgctggcactgttaggctggatcaagcgttcgaagagactacgagataatccgcctttctttgcttcgggactgataacgacgggaggcaactgtttgtgatcaccaatcattgccaggtgggcacactgtaacagcacttgaatgagcagtgttcggcgttatgtccccgaactaggtaatccttaccccttttgtcaacgggatgaccgatgtagcttcagtggccatgctagcttcgtcaaagaagacgacgggaaaatcgaatatctgtagcaagcgagacacggatgagatgcaggttgcgcatacctggcattaaaacgtcagttttgccgcatcaatttgaccaggatcgagctgaatgagactcactacatcgatgccggcagcgatttcctccagcatgtgacgttctagaccaaacagttttctctgtagagctgttcgttcttctatagtgtcgaaagacgcacaaagtgtgagctgaataaatacgtcccacgcacgtttcgctttgacataccgcttcctggcgtggctgcaaaggtcttcaactttaggttgctcagagccctctgacttgggtgtctttcgatgtacccatcgagcgttattggccacagactctctctaatcctgatcttggctccgaaccgcaagacctttagccctcgacttgcgagcccttcggccagattgtcgactgccgtgttggtatagccggtgaccaagatgggaacggagacctgccagtgcgactacaacagagtgacaattcagcattatctacgacggagagcaggatcaccaggccacacaccttgagtagatgtaaagcctcgataatagtacgagtctttcccttttgcgttcagaaacgatatcagcatccgttagggttgctgttaattcctgtggcatagacaacttacggtaccaggtggctgtcaacgttacgaagatattggttggcaatgagcttcaatacgtcacgactacaggaatcaaattgggctaaccccttgaatcaggctgaccctctcgctcaacatcatggcgatagcctttctttgactggcatttagttgtatctcgggatccccttcgacctctagaggcctttctccctgtcgtaattgtcgtttacaccaactcatgatgagcatgtcgttggtgaacattccctgacgctgaggatgactcgggtccttgcggaacgcgaccgaattatcgggtgtggcgaaatctctgagcagaacgtctcgtagagctgttcccgacaagatcgtctctctcgtgtatctactcatcgccgacggggttccatccacgcgctcgatctcggctcgcttctggtcggccgccaggcgggtgctatcacggtcgatcgagactggatcgtttcgcagtgttgtaaaggcgtcttcggtccgccgcagaacgatgtccgagacccaaagatccaatctactcggggtggttttagctgagcgaatcgggagccagggagacaggctctacttacctccagaggttacgcggatcgtccaagccgggaacctctgccggaaacatgacagtcaaacgacctgattcttgcttgatgaccgacccaacaaatgcaggaccttgatctggggtcggaccgtcgttctcgacgtctggcgttgattttccatctgtgaacaactcggcatcattgggtgacaggccgacagctgatcccgttctatacagcactgcttagaagacaattccatggtgtaaactcgattgatcactcacgtcaaacgattccatacgaatttcctgttgcccttgcctggaaatgcaaaactagcggtctgaaaccctccgacggtttgtttcacccagctgccggcgacatcggcgatacagaagccctgctgaactagctgccccttgggagtggaactgagccgcttggcggcgatttgagtttccgattcgaattctttgcgctgcaagctcaggaatctttcgttgatgaattattggcaaaacagttcagcatcacgtgattcgtcccggagggcgaataggcagggtttgctcacttttcgctatatgcttcaatcgcatccccccagcgatcgtcattctgatttcgtgcagagggaggctgtatccgttgcttgatgccggcgccgcgcggctttttggtacgggaagtagctctttgtcgccagtcgaaccttgagggtatcggcttgcgatcgataccgagcccatacgtaaagtgcatctctagtgatgcttttttggatcgagctgattttgccgatcgctctttatccgcagctttggtcggcacggcaagccgaagctttgtcttcttgttgggatggttgccttcgtccgaagcatccatcctgcgctccagctcggcgatattcccgacgtcgtgcgactcaaaaaaatggttgtcttcccgatgcgtcaaagcatccttgaccggggacgtgcccgcctcgagcatctgggcttcggtcgagcccagatcgaacatatcagaatcgccatcggcacccgctaatgccgcgtcaatgcgagatagctcggcgatgtcctctggttcgacgaacgctgcctgatcatcgaatcttgatgatctcgtttcaggaagcgagaatcttcccaaagccagagatcccgtcggcctaggatgatattgacggccgcttccctcgccgaaaacatcactgaaacgatgatggttgccctcgtattcagcctcttcatcctgctcgtctttgatctgagcggcggtagaaccctttcggtccagtcggagccgatagtggacagccgattgttttactcgacagcggccagatcccaccgaggcagatcgaggcgggtaccgtttaaaattcgatatagagcgaatcgctcgatgaccggtcgatgtcgagagagcatcatgtcgagctccgagcacgttccgcagagcgcagatctgggttcgagaacatcaattgatgagccaaacatacgtgcgatgtcacctcgagcggcttaccctcgaagccattcgatgattgtcgcatctacgaacgagcttgcaggctgaaagatgtatcgtgcgatagcttgctatagggtcacgacagttatatcggccaagaaatgaagcaagatttggtgctagccgagcccgagaatatcagtgatctattatctatgctgagctgttgtcgattgagattcgaggcatgttatttggccactggtcgtgcaattgaggttctcgagctctttgacaagcgtttcgacgtgatgttcgctgcaaacggcaatgagccgatcgaaaggtacgagaaaggtggaaatagaaattgatcgatcaatagcttccgacacctagacggcatggtttcatcaaatgtcagggtcaaatcatcaacaaatcttctttcggaagtaaatatcagagtctcatccgaggaatctcgcgagatcaaaaggccaaagctctattcagtagtgatcagtgtactagtagtactgtgctcatccatagcttacgaattgatgggctcaatcaacttgatcgaatctgcaagtcgagcttcgtacctcatcaattcgaacggcaatcgtcgtcacgagattgtcaattgttgctccgtgagacccctcagctagcccgtcagtcctcgcgagcaaagcctaacagcctttgcctttcgactctcgcgagatgtcatgctgaactccaagatcctccttgataacagcagtccacggctgacctttagtggtacagtcaatcagctctagaccccactacaagtaagttctcgggtaaatatcactgcttctcactggtcttggctcattcgaggccgcgcaagaccgaagcctgattcagccgccgcgtttcactttagcccaactgggtggctcaggccgacctcacccttcgaccgacgtattcaactatacaagctgaccttggtccgaattgtgtaagttgccaacctttgcgagaacacgacgactgctgacaaactcagagtagctttcgaatacccagcccgccagaactcgatctccgatgacccaagacgcgcaccctcccggatgggcgtcccatccacgtttacctatccccgtataccatcagcgtcatgatccgatgtttcccaatccagggataccgacccaacaccagccgtattcgcagtacgcagctcgacaagaatttcgtcggtatccgaatccgccgtacatgccaggggcgcccattgtgccctggccaccacgacccgaagaacaacttcgtccctcgagccgtctcgtctttccgggacctcacccgatgaatcgccccgatctgggaagaggagacacgggtcggcatgtccaacccattcgaccgggtctagatcgacctgccacgcctgtatcctttatcccggacagtcgccgatacgatttcacctggccagaccttatagaagcgaacaaaacaccgacaaaagcaagcgttcagaaggctcgtacggctcacacagcaaaggcggacatgcagaggcacgggacgagcttacatgaccccacgacccgcgatgacgcggtgatcaggaaagaagcagttgccaagctcaaagccagtcgaagcgacagcgagtattctgacgccccttcgacgggatattggcgaccgggaggatcttttcaaccaacatcctccaaacaacaccaacctcaacagcttcttaccactaactgcctagccactccacatgaacaaggtgcttccctagaaacatcccgacaaggcagtccaatgtcgcgagccacgagcacttctttcggtgtggaaagcttctctttgacgtctctcaaatcgtttggcgacggagtctggggaaatgatgatctgccgatgctcaaggcgaggctacgaagtgaggacagaacctctccggattcgctatgcccggtcgaccgcccgaaacagacgccggctcctacggttcttggggtttcggatggcctcccgttcacgcctctgatggacaagttggatctctttggatcgccctggactgagtttgctacgccggtctctgatcttttactcactcccaattatgatgtgataaattcggacgaactaaaagataaagggatcaacacacgagagaaagaagattgggagtctgccactagacgatccatcgttggcgctctctgcgaagagatcaggtccgagttgagcgcgttagaaaatcccgcgcttgaagacacgcaacctcaggtcaaaattggatcaccggccggaacacaacccctgaagaacgtgctgaataagcttctcaaaaggtttcaaggaaccgacaacgagtaggtttgaccccttcacctcctttatcttgctcgagatcacgcggaagcacagcctaatgacgcaacctggctgttaccgtcaaatataaagctacgaaccgtcagtgtgttcagaccgttccagcatatcgagttcgagtttggcttccgcttgtgcctcatcaatccaccccaatccgatatcccctccgtcccttgtatcctcggaggtcccgagccacctcaaagctacctccaatatgccacttatcagcaacactcactctcaagctattccttacgagcaggaagatcttgtcaaagtcagtcagtgatcgttttcattgtctaggactgcgttaaaatgtgtcggcagtctcatagcatgacaacgttcgcgtcgatattgttagatggcgattcgacattggtcagtgcctgcgcctttgccaggaaattacctccgtagatcactgaaacatgttatttcagtttcattccgacctcatccgaaggggggcgaagggcggtcagtctcaatctgacctacaagtttacacgcgttttcaacttatgtagataccatcataggtcaagaggcagcatacgcattgtctaccgcggtttaccacctatgtcttggccagtcgccatctggctcggttccgaactgtttcacagtacaagtctttttcaagtacgtcgcgcgcccagattgtttcatcgattgaactgaacaccgtgcctattgcagcgaggtaggttgagctcaaattgctccagatttcatgccatcaagtagctaaagcctcgttacagcaagcaatcggtaccaaattgatcgaggtggggcagcattcttgcgaaggagattcagccgtcctattgactaaacgattgcgtggtagacgggggtcattcaatcaaggaagaccctgagcgacttcgcgaacggatttacggatagtcacggactcttcactttcgtaaacgtcagcacccgccaagctgcggcgacgaaagtcaaaggtgagccaaggtggttcgtgagaaaccggtatgacggcttatatggatttcgatcccagagcatcttcgcctctacgccaatttggactcttgtcggctcattcttatagcttcgaaccaagtgagttacggatcgacatggaccttttaaatcgaggtcataatcctccatcgcagaccaaggaatacgaagatctcctcacggactttaagtctataggtcaaggcggcaagatttacttcgcacgatcggcgcctgtagaggaagcggatcctctcgagcatatcatgggcgagaacctggaaacaatccagggactctttaagacctctatcatcaacacagacgtcgagcaagaagtggagcaggtacctgagagcgaagttcaagatgacgacggcgaccgcgatggagtttccgaagttggcagcaccgattggaccaaagcaccctctgcagtgatcgtggaccagacattgcctctggttccagcctccattgccagtgcagacgactttgttccgatactatcccgcaagacaaagaagccgactctaggattcaatagcaagatgagcatgaccagttctgccgtgagtacgaagaataccaataccgcaagcatgagcgaagcgaagaagcgcaagaagtctcgtgggaacgcctcgggcttccaacccacttttggatccgagtacgattatgaagactacctcagcgtcaaacgctatatgcctcgaccttgccatcggttttacctcacgaatggctgtaagaatggagcgaagtgtcactatggtcacgaatacgatgtaagcataggatcccggatgcaagaaagttgttcagctagctgaattcttcccgggcagttgaccaagggggagatcaacgcgctcaaatcgctgtcgaaggagatgctttgtcccgcctacgcaatcggcacgtgtaagttcacaataaggaggatccgctcgggccggtcattcggaactgaccatgtatcgcttccttctgcaggcaagggaaacaacgagagttgcatctacggccacgaatgtcctcttaatgcgtaagtcttacccggattcttctgcgcagagcatggctatagcttacaatgtttgtgttgatcgtgtcatagagattgtaccttgtaagtccggtcgtcaactgtggacaacggttcgctcaactgaccaccttgcaacggtacttttgcagcggaagcgaggtaggggaattgtgttgcagtctgctttcgatttagagaaactgaaagccacatcttgcagtgttggttcactcccacccaaggtcctcacggcaagaattctcgcaagtaatttgccgagtaattggatgaccgccgactacgactgaacgatacgaccatgaacgtcgatgtacgagtttgacgtcccccctgtatgtgtattcgtatgcaaactgttccccaagtttgctttcgtaatggctatagcgctggcgaatccctcactcgttactcgtcatacatggtatcgtcataagccatatgaacggactaagtggggtcgttacgctcgcagttccgaatctatagtgctgtcgtcccgactactgttcgccttgtcgcggagtaatttctccatcagctttcttcggctttcgaggatcagcctctgctttctttgcaatagcgtccattgatcctggctatcctcttcctgctgcgcaatagtcacgtcaacctcccgccccttgcctttgtttgaccgggagatggcggaagatatgctggaaatcgtctgatccgctattcggtctctcaggttgtacctctcgatcaaggaaggatacttggcagaccgcgtggttttagacgttgccgtcgaagtgttcgatgccgagttggatcgttcggcttcgagccgtgcggtctcctccacgatgaaaggatgcacagggaacgtcgatggtggctaccacaacacaagagagtcagatccctaagtcggtgaaccagattcagagccatctttaagcagacgtacctcaggcaagaaaccccgttcgagaatttcctccccagtcctttcagccgaccgcgtccgactcagcgagtaggcgattgatgatagagatatgtgagggaacgtctgatgcagactctgaatctgaaatgtaccaggacactcaacattcgatcagtcaacgccgtactaggagaatttcgattcgacgcttacctgaatggcggtgattcccctcagcggaccagaactgggcgtcccatcactcgaagcgggcgtcgacgagtttgctatcgaacaacaccgacagctcagtgaccatctgtgaaacctcgaatccaggctgagatactgtcgctcaccggcaggatagaaatatcgaacagcaacgaagatgagcaggagggcgatgatgattccaggcaagtcctcggtcatctcgactgcagcctgtcggtcttgccacaaaggttgcaaggcgtaatcaaaggctcgtccttccaggctacccgaacgtaaaggtagaaagctcttcgtagatgaacagccttgatactgtgatggacaaaagagttgtgctgcgaaacaaggtctttattgaggacaatctgaacacgatcggtccagctcattaatcatcaattcctgagctctgaggtcgttcgacccagaggtcacagcgttcgctcgcccaagtcgaatctgaatccgataaggttccgacactaatgccggcaagaattacgctacctagcgcttgagatcgtcatcatccgcgcttttggttcgatccagcaaatctgcttccacctcgacccgggtcgttgagatgaagataaaagccggcggggtcgcgggcattgtgttctcccacgtctgccccgtttccttgggcccagggcgcggtgacagggccgtagcaaactcgctaagatcgcaagcgaaaaggcaaataaagagggcaaggtccgtatcgcttgcatgcacatgtcatgtgtcaccagccatgatgagcccgggtacccgtagaccagcatccacctctgctgacttctggaaagggtgacgagcattcggcgcacgaccgccgagctcggcaagggcttcgggagtgagatctcaccgagacccatcttgatgcgcggaatcctgtgaaagacttcgggcatggatgaacggtaccgtctccgcgatacatgggatggtggcacaatgttttggcgaagtcttgccgtagacgagagaagtactactgcgacgatgatatcgacccggagttgctgtttctccgtacactactgctcttcacatggagacgcgcagcaatgcgtaccctcttttttgaattcgaatctgtatagtgtctaatccagcgcgggcggtgcggcaactgcatgtcgcacgtattccacagaggtcgtggccatagctcgcggagcccggacggatgatcgactgacccaccccgaagcctcgatcacacccgggactgacacaggctagaaagacgtcaatcgcgcggacgccattgaccatgaggcgatgctgcaagtccaagacctcccttgggccaagccgaggataacgtcttcgcctcgcttctcgcttctcgagacctcgggtcttttcccttgtcttttttattcagcttgcttgctttgcctccgtgcgcgtcgtcggtatgggtcacaagccgagtcccggctatcgttctttgcccgatctcttattcgggcgcgatactctcaccaaagagcaggcggcaaaacatggtactgtagcacacaggccaggcggtgttgatcatgcgatcgtggctggaaaggaaagcggtaggccaaccatgatagggcaaagggacaggggcgggcgtggaaggtgggacgaactagcgaccgcaaagaaatgttggcgtgtgatgagagaggcatgagaggaattcgccaggacggtctcttggaggattgcttgttgggcgagaccgattcggaggaagtacggaatcagcaactgcgagcgacgctgccccgctcccggtgcgacacactctgctgttcgcccgttcgtcgaccgtcaaactccccttctcctcgtctgcccaatcgttcgaacaggtcactcggggtgggttgatcatcatcgtcgaggagggaaatgcttcccccccccccttttgagaccctccccgttcctctccgtctgcccgaagtgatgaggctggccgctgataaacatcggtcctcggggaacagctggtatttcccaatcgtatagagtagcatcgtctcccctgcccgatccttgtctttgcccctcgcctaggattaggagtagggcttggaatgggcggggtagggaaaggcaagggaagagaggtggatggtgcgagggcggaagagatcaagacgttgatgcgggaaaagcagtctcaagtaagcaaatccaggcggcctgaaccggaagatgatcttgctcacgatgcgatcacggtggggaaccaccaggacctcacatacatgtggaggtcaaaactctacgccgacgtgctcatccagatccccaacccggcggcctcatcgtcttcccgtcagtctaaccaaaagggcgtcaaaccgccaccgtcttcgtttcgacagactccggtcatccgccgagcaacgtcattttcgtcggtcaaacagcagtcagaaggcggcgcaagaccaggatcatccctcagcttcaacctggacctcgacaaggacctcgggttcgaggtggacgaggagacgggattgatgaccttttctgcccatcgcttcattttatgttcccgtagtccctactttgcgcaagtcctcctcaacgccggggagtttcaacctcacatggcttcggctgcttttcagagcaaggccggggggatcggttcgataggccaggggagagaagccgggatgccggtcatcggcctcgagtcgcctccttttaccccccaggcgatgcatttcattctcggatacatctactccggatcgctaggaaagttcagcaacaaacaactggatatggccacggcattgttgatcaggaaaggagctgcttatctggaaatggaagcgctggaaaaagaggtcgaggggaggttgatttgggaattcgctcatggggttgcttgggatgatcgtgtagacgactcgtcaccgaacggatggggagcaaaagtcagggcctgtcgatgcaggaaatgcgtcaagcggataccccgcctgttacgattcgccactagcccggacgtcagctcaaaggacctcgaatcactcactaaggagtacgtcatccgcggttggagcgagtgtctaggcaaggacgtagccctcttggacgagcgacttcgcgacgaagtgctcgacgcaatcgtcgaacgaatcaatttccgatcggttgtctcggggatccgtggcctcttgactgcccgtagacgcttggagcaggaaggaaagcccggagatgaatggtacgacgacatcgaagacttcttggatgtcatcgccgagcgaaccgtcgaggtcatgaccggtaacctcggtgcggtcctatcatcgaaagagatggttgatctcgtcgagaagcccgtggtcgatttcgagacccttgaggccttgtgtaatctgctggttcaaggggttggtcgagtcgaatactgtcggcatgccccggtagtgcaccaggtcagtccccgtcccaatatgcgacccttgaacaataaagcgcgagccagactaagcgattttcgttgacaggtgctcgtaaacaaattgctcaacaagagggatgaagggacggaggagctcgtactgcccgttgggtcacgcgtgcgggatgtcatcgacgacgctacaactgggatggtgcgcgttctgaggaaacgatggatgcagatccggcaggaaggcgcgtttgccgacttggacccatcttctctagaagagttagccaaaagtcagtcacatttacaacccttcgcaccgctagagtcggtccaattgaccctgaccaccgaccacaacaggcataggagtttcttcagatgatctcgtccagcaacttcccaagcgaagaccagcggtatcgctaaatagtagcaccgcttccaaacagtcaggggtcgaaaagcgtgacccagtcctgcctcgacctcgtgtaccttccctcgacagtcggacgtccgtccgcgtacctccaacccttggtcctcccgccacaatcatacgaccgattccaacctcgggcgtggcccgctccacgtccagaaacgtctctgcacccattcagacggtcacctctgtttctagctctgcagctcgacctgtgccacgcgccacaatcgcgccatctgcttctacttcgtcgcttcggggaagaacgactgttgcactagcagctagaagacccgtgcaaagcgaggccaatactgccagaggtgcgcagccaagactggctcgcgttgctggtggaaacaattcccaagcaggaccgagcgagcctcgaaaggatccattatcgtcgggacacacacccacaagacaaagagcgttatcaaccccaggtagtcagcgtcagaaggcgatcgatgtggtccttgctcccccgctgccgaccgtcgagcagaagagagtgcccaacagcaaacccggcttgattctctcatcggtgagagctagcaccaaaacgcccgagcccagacccgcttcgactttgccaaatagaggtggtccagtgcatgctacatcgaggcaagccagcatcgcttcattgtcagaaatcagggaaaggaccgtgtcgaaccagagccagaagactgtcaccaccaaaactcctttactcacaccaggaaactcgcccggccgcaggaaaccgagcgcgtctactcaaccaatgatgcccgcatcacctaaaaccactacgcgctcgcctctagcaccccgggagaaaactccagtgatgccttcagtcaagccgacagcgtccacgttggcaaagaaagtttcgacgccagcaattggagccaaaaggacggaagatttgaagaaggttccggcaaagtccatctcgtcttcttccattcgctcactaagggcgtctccagcccctaccaagatcgctacatcggcctcggttacctctaccggaccgactactgcaagcttgaggtctcgcttcgtaagcaattcgacaacacggtcgcacttggattcggactcgtccgtagcagggaagaacttgggatcaggaagcaggacgacatctgggccgttcggtgcgaaaacaaattccggtattgtaacgaagcaagcggtttcttcgaagcaaactctcaagcaaaaagaactgagcgagaccacagacgacgctccaactgaaataatcaccccgatagcggaaaaggaggatagtatggataggcccgctatcttggctccggaaattcgaatacctgagacactacacgaacccgaaggcctacccaaaatcctcgaaccgtctatggctcccctatctacgcttgctgaggatcggctcggtattgaaaccgaaatggatgttaactcgacgctgccgcgatctttcggttcccagctagacactgagaagaagatcgttctcggacttccggtaccgagcgagacccgtcggccgtcaatgcagatgctacgcacggcatcagcgagcgctgcccttgcatgtagcgagtcgaccggccggtaccaccctgcgagcgcctttgatcctccaccccgaacggtagccgcttcgactccggctcacatccttccacaagtccacgatggcattccgtttgtcgcgcctaagtacggcagcagcctttccgtgggcataccgtgcatcgtagccctgactcaagggaaagtgcgtaaattcaaggcgatggcacgctatatcggccgtcttgaatcgaccaaggtaactggcgagtgggtcggtgtcgaggtggaggaacgattcttgggaaaaactgcgttgacagagagtcaagatcgtttcatttgcgatggtagctttgatggtcggcgctacttcaagctcgaacaacaagccccatcactccggcgtgcaagtcaggcgaatttcggccagactgcgtcattgcgcggtcgattgcgcgttggcggctccacgactccccaagacatatacaacaggcgagggatgagaagtgcttctgcctctccgattccttggccacgattggacgaagataacggccacccgagcaagacagtggccttgtttctgaggccaaatgaaatcgttttcgtgcttgaagcgggcgaataggcgcgaaacgacttttcttgttacgagcatcatgatgacacggcggtcccgatacccgtacgagctgtagaaaaaatgtacacgtatgtatccaatgaggcgtctcgagtccagattgcgccgctggaacttcatcaagcgctacattcggcctgaaagtcgtacccgagccagaacgagattcaatatgctcaatatacgtgttcatcgacgtatgggcattgtttgacatttcgccaaaaagactggttaaagccagggcgagcgctatgcctgacagccggtccagaactcagggttcgactcactctcgctataggtgaacacaaggccttgtaccacatggatgtgacatgtttaaccaaggaggtcagatctgccagaaaagagaccagacgcatcatgggtattcatgataaaccgtcaaacgatagaaaagaaggatagtacagtcgcaattcgtcataatttggcttcaaactggtcatctaccagcttgtttgttctgttgaaaaagaaattcatacctagtccggcggagcacacaaggcggtcctagatatcccttcatatgtggtccaccggcgccgcggcgtctccgtatatatctattagtcaaactgcctagcctagctgtccacggacaattcatccgccttcctactacattgtgtcgggagtgaagcgccagacactcgtcgtcatacttacccgggcttatgactcccgtcgcaactgacttgagccccagcagcagtcaccgataggacagtcttcgtggtgatgccaggcgccagtcgcgcactcgcgtaccgaccgtacgagtagatgagctgcctccgagctgcggcactagtccgtgagcggtgccaattattcgcggctccactttggtccagaggcgttggaccaccgggtcttgcaaatacggttggatcatcccatggcctatgatgagctggaaggctggcgtatcaacatcgtacgagacgctggaggaagtacagactgtccaggggctcccatcgagcagaactgggagttgaggctggtagtttcgcctccgttagctcgcctcgtcatcacggagaccacgtcgatgagcttgaaacacgattggataaatccttcaaactttacggagtatttgttgtcgctgttaatccttgggagattggccaaggaagcttgaaagcagaacacgaaggaggggtccaacgataaacgaaaggacagaaacacctcttccatgatcatgcgatcgtggtagataatgaaccaacatgatcgcgcaagatttatagttgactgactttctagtgatcagtgatttgccatgatcgggtttgatctctcattcatgatcgccatttcatcaaatcaaaacaaagctcctatccttactgatcactgatcaccgagtgatttgaggtctctacctctgtatgggattgatacgagtacgacttgctgaaccacatctcactaccaagtctactaaagactaacctttcccttacgcgacaccggtcttcatctactcatacaacacgaaatagctagatcaccatataattccctcgccatggcccaccaaatcaacttgtcctttcctttcccggttgcacacttctctgagcatctggccttcactaccctcgaaagctatgtcgaaggcgacgcccttgcccgtttcgacatcgagatgagaggcgatctatggacagttgaggtgttccccacggattatcaactcgaaagaaccagcttcaaattggccatgtttgacgtggacgagattttccagtacgcggccttctcggaagatcacggtcctttgaacatcgcaatggtcgtccgtttacgtgagtcatattgttcttgaggactggcgatcgatctcaggttcaccaaattttcatgacctttgcagaccatcttcttcaacgtatgcttgtcgacgagaatctcaagggatacaagctcgtcctttacaccttagagacaccggacttcaaatcgaatgctgcctgtctggctgctgttcaggccgtaagctgacagttgtgactgctttcacctggcttgacgtcacgctgatacatcaatctactcctagcttctagctaatcgtctcgaaccttggagactgatatgccaccttgcccaattcgaattcaagccgttccgggacgcggcaaaagggcgatccgaatggtgccttagcattcaggtcagatacaccctcgtaaaccgggatcatcacgtctgaaaattcgcctgtattcttgaatccaggacgttctatggggatcctatcgagcacaacaagctggactgctagacatgaagaagatttcacccgacgaatatgaagttggtgtcgtgtttggccaaggatttccgtgtcagctcagcagcttatgtctgcgtgtcacggacagaaatatgaacttcctcaattcggcgacctcaacacgagtaagcgtccgacctacttctagacacgaagattcgctgatccggataatcctgacgctatagttggcccgttcgtcccgttcgcctcgcctagagagacggccaaatctcctcggcttttccatccccgaacccaatcggcattggactggtttgagcggaacgacgttagagccgtcgtccgcctgaacgacgcgctttacgatgcgaccttgttcacgaacaagggtatcgcgcacctagagatggtcagtgcatccatattttggtagctggggatggtttgaccgggaagattcgattcgtaggagttcccggatggatccaacccgccgctcgacttggtcaggaaatttatcggatacgtggatagggtcataaaagcggggggcaaggtcgccgtccactgtaaggccgggcttggcagatcaggggtgatgtgagtcctggaagatggtcctcgttagaatggtcggctatcctgacagcgtgagatatccccttggggtttgccttgcaggatcggcggtacgcatgcgcggatctaggttaacaatagcaggtcctgatacgattgataccgcccacagcttatctcatctacaaatacggcttcgctgccaacgaagcgatcggtttgatgcgattgatccggccgggaatggttgtcggtccccaacagggatggcttgtggacaatgccgcgcaatttattcgctgggtgagtcgaccgaggagtctccttccagcatcgctgattctgttcctcgatatagtcggccgtggacgaatatgaagcggttcaagctagcgcccgaatgcctttgacgcctcctcggcgcattaagaccggaccgatgcaaacgccagcccagcgtatgtccacgccatcaatgacagatgtcaacactgacatcttgcctcttctagcccggaaaacgccgggcggcttttatacgaccgaggacattgctcagcctgcggggagtcgggtgcgaaagggttctccccttcaagggacgccagtcgctaagcgcttccgaggcggtcctcccatctcgccgatgaagcagttaaccgctttcatgagcgggactaagccgctttcgccgcaaaggtctgtcaagcccgatttgacagattaggtacagcaagcgttcggacatggagacaggacgagaacttgttccctcctccacgtcaattaattggttttgtgatcgcgaaccttgagagatctacgttgtaacggttcgggttttctcttcgttttacgattttgtttctccctggtctgttggcagccattcaaccggcagtggtacaagatcaataccgttgcgcggttgaatccaatcgagtatgcccaggaacagtccttgaacggcgaagatgatgcacaggatagggccaaagataggtcccagatcgaggtatctgaagcgatcgttttgttcgtcatctggtcacagtaccgagagtttcacgcaagtcgcactcacctcgacatcctctcgaaaagatctcgttctggtctggccatggctttgtcatatacccgttccgtacgttctgcgacgtcatcccatgtgtacatcgtttgcagtcgtcgatgagcgagatgagggtcgtgtacccctgagacaatcgtgtctaccgcaatcgagagggcgcgaacgacgtctaccacccagcatttcagctgcctcattcgggtggctgggtatgagagactgagcagattgtacataccgtgcgagttgggcgaggcgaattcgatcatgtcttgaggcaagacttcaggcacgcccccgacctttgtgctaacaataaacaaaccagccgaggcggcctcgatgatgctgattccgaacgcttctgtgagcgaagtacagagataaatctgtccctgattgagcacctggcaatgtagtgtgaggtcagcggctcttatctcccggaagctattggtagcacagacgcagaaagacttgccgagtgaacctcaccaggtgagacctcgccaaggagcaccactcggtcttgtaagaggtgttgctcccgcatttgttccagttcaaccatctttggaccatctccccctgattatcgggtttgcagtacttctcattagctctgcattgaagaaagaggtggaagacctgcgagcgacttgcctacgatgaatcgaactcgggggtacagggcgcatatcttgggtgcggcgctgacgagcaggtcgatcccttttctgtagaccagccgtgtcatggtgataatggtaactaccaaccccgatcggagggtccatcagctggagtctccttttgacgtcggtcatgtcatggatttccaccatcccgactcactccattccgggtcggctagttcgggttgcggctgaaacgtctcggggacgatggcgttaggcaggacggacaccaaattcggatccaatcgagcgcgaagcgtcgtattctctcgtctgcggggaattggcgcacgagatcacggaccgaccgtcctcagctttgatccgattgaaggctgagtgcgatctcgatactcacccggcgtggctcacacagatcacggcgtcgatgtttcgtaatgcacccgccaagagcttgttggtcaatacccctacggcatctccgaatccgaacaacgagtggtccgtgaataccgtccgcacggtctttgatcggccgttgacgtcctcctcctcccatatcatggaggtgtaggtcccaggatcatacgtccggatgtcgagaggcatcttgaagaacgcacactgcataatcccttcgagtgccatactgctcaaagtcgcgtgtccgtgcaagatctggactcgttccctcacgaggatattgcgtaggaagggaaggttcgtcaagtattgagggagggtagcgtccgaagagatgggcacgataggaaggtagtagactttgagaccggggtgaaggtaccgaatgccgactcggggggtggacgggccgttcccggaagcgccggttcgggagtgagtgatgacgatcacctgcaggtgggtgagtcgtcacgccgtctaaaaccatcagctagaggtcggttgtggagggtagagatggcaaacatcgaacggaccttgtgaccccgatcgcgtaaagcagccgccaagctgtagatggcgatctctatcccgcccgcgactggcaggaaaaagtcggaaatcatactttttccatcgtgatttcagcgaacggattttcgagagttcaggtcgatttgttctacagaagcggcgtcaggcgaatactcacgctatcgaatacggcatcttagccgatgcgatacatgaaggaccagtccgggataggtggtaggattgaaatgcgagagaacaacggagagctgtagtgtcgagtgggttatgaatgtagtttgaagcgactgctcggcccccccggtgatgatgaatagcccgagggcaaggtagctatcaccgtatcacgtgatatgatcatgatggccatcgactttgtcaacaaacggaattcaagttacggcatcgttcgtcgctgtgaacctccctcctcactcactcgatctgacaatcaaaacaatccaaccgacctttatcgccctcgtccgttccacatcatcatcatcatcgtcagcgggccccttctatcctataccaccatcgtcgccaatccagtcaacaggtcattcaattgtatttgcctgccggactgcaaagcaatcgctaccttgcattgacattcgcccacgatcccatgtgcgttgctcgctgtagcgcgaaactcaccgggagactaaagattgtcatcttacctacgtttcacctcttgtgctcgcagaaagaaggccccaccaccctcctcatcctcaactcgaataagagctcgatataggaatgtcaaaaatggaagctttgtcagtcatcgtctcctcctgcaacacccatcagcgtgatcgtgcaagctgaacctccctgtgtatatccttatctgcgtccagacgtcaagctgcccctccgccgagaaggggtcgacctatagtgctcagtgatagtgaagaggacgaaatagacataccggttcttacccctaagatcgccccgaggtcagcggagccgatagacaagtcgaacaagtgagtcgccgatcttcgcaaggctcctttaggcacaccgaagaccccgttcggaaaggtgaaacaacgaggaagagagaaagctgacgaaagtcctagctggcacggtactatgagaccgactgacgcccaacaggtagaagcgcatcgtcctcgtcctcccgtctttgacggagccaaaggggaagaggcaaggtacaagccaaaccttgatccgaggtcgaaccccgatttgaacctggatcgtgattttgatcggctcgggcttcaaacgcacagagatcgccgttcggtggatctgccggatcgacaacggaggagttcgggctccgagaagcacaaggccgagccggtgaaagaatgggtcggtcggagtgtaatcgaggtcgattccaagggtcataggcagcccgcagactcgagaacgaaggatagtctctcgacgctcaagccgttcgtacttcccagtggatctcgtacggcctatagggacgatacgggcaatcctcgaccgaccgcgttcgatcgacctgcttcgagctcaaactctcagcctcagactcgaccgaatccggctgcaacacaacagggctcgtcttccgcatcgtcatcgtcctactcgagaccgagcacgacggtcagttcgtcagactacgccaaattcaagtcgactggcgcgttcgcctctcccgcacgacccactgcatctgctttcgaagtcgcaccttccagcccgttctacaggccccaaaagccacaatcccgagtattacctcaagactcgtggatggtcgcgcagatgaacgctcatcatgcgcagcaacgccagaacggtcgacccccctcggcaagttcaggcccgagcatgggtcaggcttatgggatcgccgcggggtacgcggcaaagtccgctgctgctgccactgctggatcttcagcaggactaagcgtgaacaaggaggaagacggcgaggatttctctgccgccctgaacaacgtacaagtagacccttcggactatacgagggtctcggccgatcaagcagaggcggatatgcgagagttgctctctggtgccatcggggatggagaggataatactggaggggtagaggacggatccaacttggtggatggtttcgccgagggcatgtctttgatgccgcatcagattaggggagtgagttggatgggcaagagagaggtgggaaccaagcgtggtggcatcctggccgatgtgagtcttggtgggaaaaaagacccttacgaggcaagctcaatgttgcgcgtctgtcctatactctaggatatgggtctggggaaaaccgtacagaccatcgccaacattctgaagcgacccagaaacaaggccgaggaaaagttgggatactgcacaacgactttgatcgttactccgctgtaagtctcacgagagattcacacgcacaagcgggtccgaagctaaagggaatcgataccccgcacgcaggtccgtcatggatcaatgggtcaaggagatcaagaacaagaccgctccaggtagactgaaagtctgtagttatcacggacctcagcgtggcaaacgtgagtctccacattatagtcgggaggatctgggacagcataagcttagacgaggcaacctcatatatcgtcgtatgctttaagtcgccgacaagctgcacaaattcgacgtcgtggtaagttgggtcatgcggtgaaaagcgagcatcgaatctcacacacgaaactttgatctcgtttacgcaggtcacgacctatagcaccctcagctcggaacacggcgctccgaccaagacgaccgcagccaaagccaaggccaaggcagccacttccctgcaatcagactcggagaccgggtccgaatcggacggcgagaggttcggaaagagcttgaaaagagccaagcccaaggccagcccgctctttcagatgaaatggctgcgcgttgtgtgtggtgagtcgagcattccaaaaggtttggatcttgtgagaagcatctgacaacgtactcctcacgtagacgaagcgcagcagatcaagaataggaacaccaaggctgccaaggccgccgtagctttggatgctaggctacgctggtgtttgaccgggtgagctacaatgtcacgcatggattatggtcggcaccgctaagtattttctggcggtgtgatacgaatatacagaactcccatccaggtaaatttccgcctcaaaggcctactcgcagccatagctgacgccttcgttgactgcagaataacgtcgaagagctcttctcgctgttccaattcttgcgtgccaaaccgcttgacgattggagccacttcaaagagcgtatcatccaacccgtcaaggctggacgcgtgaaacatgcgatgaagaggatccacgtcagcatcatccatccccggtactctttgattcttaagccgacttcctcttatcctaacataggctgttctgaaagcgatcatgttgaggcggaccaaggatgctaccattggcaagtcgacccgaagccgcggatgcgagtacttcttcttatggtaatggtcacatcccgcagatggcaaggcgattctgaacctaccagctcgaaatgtcaatgtcatttcttgcgagtttgaccgggccgagcgcgacttctacgatgctctcgaaaagaagcaggcgttgacattcaatagggcaagtcgtcgaacagcatgattatcggactagcaaactgactggatccactgttcctgccacagtacctaaaagcgggcacggccatgtcgaactatacttccgttttaaccttgctgttgcgaatgagacaaggtaggcgaattgctgattggcagggtgacttggttctgattgcccttcactttcagcctgctgccacccttccctggtgactgcttcgctatcgaccgatgcgtcggccctcgaaagcaagcctgccgtcgatgacaatttggaaggggacgcggatgaactagcggacctgatgcaagatgttggacttggaaagaagagcatgaaatgcgagatctgtcttgcgccgtgagcgtccgcagctgacgaacaacgagacacttcgaggctgctgacgacttgaactgaaacagactggccgactcggtcgcgacatcgtgtgatgattgccaaaacttcgtgaggaaggctagggagggatccgacgcctcgcccaacatgccaccgagcagtgcaaagacccgtatgacattaaaaatcttgaagcaaattgaagaacgttcgggcggggagcagaagaccatcatcttttcccaagtgagtcagacagccagaatgtatcgagccccgtcaaagctaatgtacctcttcagtttacttccttcttgaacatcgttgaaccatttttgaagcagtcaggcatcaattacgtccgatgtgagcgcgagaccgtgatcgatcctagaaatgcactctgacaccgaccaacagatgatggtagcatgcgagccgataagcgagaacaggctctcgaagcgattcgcagtaaatcccaaatcaaggtcatcctaatctcgtttaaagccggaagcaccggtctcaacctgacttgttgtaacaacgtcatcctccttgatttatggtggtaagtgttgcggacgaggccttgccatgaatcgatgctgatgctcgtaccgggcattccaggaaccccgccctagaagatcaagcttacgaccgagcgcaccgcctggggcaaaagcttgattgtcacatttataagctgacagtccgagagtccgtcgaggatcgcattctcaaggtcagatttaggcaatgtctcctggaatgtgtcaatttgctcatttgccgtcagtgcactatcatagcttcaagaagccaagcgagagctagccaaggcggcgctttccggtgattctaccaagaacatgaagttgcagctccaggatcttatgggtaaagcgggctcgatcgctctgttacgctgtgcagctgattccatcgttcggctcttccacagacctcttcaagccgggccatgctggccgcgatgacgatgatgactgatataacctctaggcttcctctcgatctgagtcttgcgtttttttgatcgcccgtataattgtagcgtctcttgatttctcatatgtttgtgtagcctgttgtatggcgaagcgaaaagaccttttccgaactggtctggggtcgagcaaagggatccattggcgatatgtcatgctgaaaaatgtcgtgatagaatgcagaaatacaacgtttagacggccttccatgagacaccggacctgatcgagtacaagacagcctagttctgagcgagagacagacatcagcagctggatatcagcagacctgaccgcgtggacttacctctctccactgttccttgcaaagaatgcatcggctgttgggagggcagggaaattagctacatgggtaagaccatcttttccgggcggcagctcacaagaaactcgtcataggttcatccgcactgtcgagcgatcagacgatggttaggctatgctgagaagaacggcatatttacgtgcacttgccttcgaatttgcatttgtcggaaatatgctcttgtagattcgcacttagggcagtgaactgtgcaatggtcgtagcaatggaagcttaagcgagaagaacttgtacctttcaaaagagccaaaagaatcacgaaccttctgcttgatcaacgcgatcccagccttcctctcctcccaagacgtctcccacttctttccgctcaaagtgagtccgtgaggtcatctgtatgtgatcggtcagcgacaattttccttggcataatcaagtgtacagacctgttttttgatgccaaagatgtatggacaactattacatcgcctgtggagaacgtcaggatctcccattgcaaaacattgcgcgaaccgtactcaccacctgttcgtcccctcaaacacctcaatcgtcaagaaattagaacagtagggacagaacaacatgtttttgagaattgagcatctgcgtggtatatcagacggcagaccgtaagtctggagcatccttgtaccgtctcaacttttgatgttgcactgacggtcatgagcgggcattgttgaatttgtcatttggcttacgtaagccgaatttatagcatatccgccaaggtagactttgcattaaccttcgtccgctctacttctacccctagctctcttggtttctactttaattcccctgaacctaggatagatccgctcatacgtatagtcgactgtaggaatggcttcgtccgacaacatcagcaagcgcctcactgcgtttgtgaactttccctctcaatacacccagaaccttttgctcacggctcttacgtcgactctaccggctctggcaattactactcaaccggcggagtcgactgaggaatgcgcacaactacaatgggcggactacgatactctatacattgatgatatcatgatgcgtcccaacgaccggttgatttcgagctatatctaccgcaaaactctgatcagaaagcacatgctgcacaacacgatccaggaatatctggccaaacaacgtcatcgagggatcccgactttgcttgaaacaagcatcccaaggggatgggtgatcgacattcagtttgccgatgaattggacgaattgatgatggacgagctttatgatttgaaggacgatcttgacgcgaatctgaacatcgaagatagctcgcaacgaaagtgagcacgcccgcgagcggaactggggtagtgcacggctaatggactgcctatgatatcagatggttcatcttaaaaccgggaatgtcggacaaggcgcagggtatccggatgttctctaccgaggaagagctgtgcgtgggctccggtcctggcgagttagtgtttacgttgacttccgtcttttgagactgtcagggtgaccatcttcgaaggattcgagccagagagtgacgacgacgacgaagaagaagaagaagaagaagagggagatgacgatgacgatgacgaacagggcggagaaattctcacggaagaagagaggcgacggatagaaaagctcgcaatacaagatttcccggatgacgaaccgttcgaaccagcaggcaagccaggatcagatgagctcgatacgggagttcagacctcgcagcttcggcattttgtcatccaggtaattccagcgacttgctgacctcgtggagcccacgctgatttcgttgattcacaggaatacgttccccgaccaatcctcttcgatccgagagagagtcgatcagatacaacgtccgggctagaaggtcacaaggtgagtaattcattacacgagctcgcgtaccgatcgttcatttctgctcggacagtttcatctccgtgcatatgtgatgatgagcgggacgtacaagctataccttgcacgcacgatgctagcgctcttttctgacaagaaatttggcttctcttcggacgatgatgccgattccgaactagacctgactgcgcatctgacaaatacgtgtctccaggtgagccagcgacacatggcgggtttggcggtctgatgctaatcaaacgtcggaactcggcagtctgaggctgtgggttcaagcggtccagcagaggagctcgtcaagctttattgggagttgaagggtcagacggctctggatcagagcggtaaagcccagggagagattaccgaagaatggctcgaatcgacatacgacagcgttggcaaggtcgttgcagagaccgtgacagctgctgtgaattgcggaagctttgggctacagttactgcccaacgcatttgaggtgcgttggattctaccttgccttcgccgtgttgttactcaccgctctgtttccatatgagcaaacagatctttggagttgacctcctgctctcattcccatcacgtgccggcccggcgggaacggacttacccgcccctatagtcacgctgctagaattcaacgcgtcaccggatttcttccagtccggagaacgtctaaaggctgaattgggtgacatgttcaaggacgtagtccgactagtcatcgcaccattcttcgacctcgatctgattacagatgaggacgaagacgacgttcctccggtaaagtccgacacatctggatcgtcctgggtactgatcggaggggagcagacgcgaggcgaatggtgattatcaggtcgttacgtgtcgtatatctatcgttacaatgttcgtaatatcacatcgtcagtttgatacccgccgccttgaacagccgcaagcattctattattgcatccgccacctcttttcctggatgacttgagcttgcaggggatgtccatcttgctaacagctccagcagtcgtctcggcactccctgttgatcggcaatcgagaaaacggcgcttttctgagcggatgggcttgaagaagcgaagccgagcagattggcaaggaaaacggcagcgcggaaaaccaagcctgcatccggatctagggtagatatctcttccacttcgtgatgaccatcatcgttctcgtcttgaaggaccggaggcgagaacatgtcgtgaaccatactgaagacttttttctgccggtcctcttttgctagcaagatgcgacacgcagtcgatgactgggtcagagtggcgagcgcaccagaggctgccagtcgagtattcagatcgtacacgttggtcatggcgagcaagacgtgtagtcgggaaaatgtcgcgctttcactgttccctatttcatcgatcttgggcggcgtattgggagcttctgatgtgtcccctgaataacggcagaatccatcataggaagccagtaaattgcaaatcagctcgacggcagaccgtcggacgagctcgttatcctccagcatgagatgctctgcctgcttgatgatctcggagtcattcagagagaagatcctgctcgcgacctctgggccaatcgaggcgagattggtcaaagccatcatcgcctcgaatttctgcagcagtgtcgaagagtcgtagagtaataatatggagagcgggcggattgtgtcgagagccgtcgaagccgggctgactccgaaaagcacttgaggcggcaacgtgataagcatctttgcgagcgcttgaatggcaggcagtgtttcggccccggcgccatccgcttgcccattccctccttttgttctagcccggaggtctttcgtttcaaccaacaaagaggttacgataccacgaaggctcttgaaacccccatcccgtaccagccctgctcgtgtagcagcatccgtcgacacttccaagtacaaccttcctgtcaaagctttgaccctagtgctgtcgcttttgccaaggtcgatcaagcaatcggtcaatccgtgctgaagcgcccaccggattctttcctctacagcctcgctcgagtcgatacgatcgtcctcggcgtcctggctgacggtatcgcccaacttctgtttggccttgccggctgaagccaattgtttgagcttttcgacctgcctttgctccgctgtgagagtgggtcgccgagataacaagttgaggagaatagtagcgatcccataagtcagagacgaggcctctcgaggcccgccttctggacggtccagctcgccatctagggcataagatgcagatagccctgatttccggccagcggtcgctttgggagctgtagagctcgataaccgggcagcgagggcaaagagcgattggatgaaagtcttgtcctgacacagtgtcgccttcacagatggttgtgatgctgtgtatgctagaccttcgagtgccgagctgagcgcgtcggtatcgagattgtctgccttaggtccgacacctgcgatgaccgctttactgaacaggctcgtcagatcctgcatctctcggcccatttcgccctttctcttgttgctctttgcttcttcttgctccgcagctacgccagagtcattgatcagagggtctgccgattcggctcggatgagcttggtcaaggcgaccgaggcgacaacgatcgtcctctgcttgatcgaccgtagctgctccgatacactgggtggaacctctcgacgagcttgccggtcgagccaatcggatgcgatagtccgtatgataggacggcatgcagcggcgttcaagctgcaggagaacgcctccgcaagggcggatgccaacctggcttgactgagcagcttgtccgccacgttttgcttactgggtttgctgtctgatagctcttcgagttctattgcgtcgctaagtccctgcacgaccccttctgcctgaacaacgagttgacccgccgcagggttgatctgaaccaccgccgatagtagagccaacggacgaacgagagatgcagggtctgtctgctcgagctgggccttaatgtacgagctgatactcgtcacatccggactcccagctgtgtccagagaaccgtccttgggctgaagaaatcgggccagcacgagaaacgctagcgaacgtgctcgcttcgaattgctttgatgtgagtcatcgttctccaccagagcgttgcacaataggtcgagctcggtcgaggtcagggtggcacctgatgacgaagctgaagaggagacggttggtagctcgagatctttgagcagctgctccagctgctgttcagaggtcgggtttgacatgcctgttgtctccaggctctgtatgcttgttatccgacttgtgtgtcatggttttcttgtgaagatggtcgaggagatcagaagagctgtttcttcggcagttcccccagtcccggcccggctctaggcgaacgtccgcgtatattttggtagtcaagcgaatgattttaactactagacctgctggctagctgccatgcactcttcaaacggcaatctcctcgtggaccagcacttcacaaaagcattgcattgtctccatgctttgattatcgacacgtattcgtcgcttgtgattcgccgtagcgactacctcggtagctgatctgcaaacggtcgatgtgccgccagcaaccccgacgaccaatctgactcaatagtctcgaatagacatcatggaaaacaccttgatcccctttattccttccaacctcgctccgttattacaaatcgatctgttggtgctggaacagacacgaaaaaagaatgccgctcaacaccgctccggcctcttctttcggagagtccacgagatttatcgattgggaaaggagatttatagggtgctggattggatgggtatttgggtaggggaggagcgtgagaggagaagatcagaggcgttcaggttgaagcacgatatcgaagaggagggtcatgagaaagctcaagagctcgccgaggcggaagctggccaacatcttgtcaggttgacgatgctgctggagagagtcagtctagatctacctctggccagcatgtcagacatgctcacctactttccacatcgctgcagatttttccagctctatcgaaagcttcagagtacgttcaagctccacgttctatccttgagcttgtctgatttttcgttgcgatctttacagctcggtgaccaagatgattcaccatttgcacttcctgcccctaacgaccctcttgcaagccgcctacgccagaatctgggtcatctccaccacgatatacgctcatgtcaaaccgcgcaatgtggacggttcgatgacggccgttctgagcgaacaagacgtcgtcaatttcggctcgggtcactcggatctgaaggagagattggaggtcgccaaagccgagctagatagccgggcttgcgatctgccagggcaaaaaggcaaagctagagaggaatctatacctcttgatgcgctcaaggagacgaattcgaaggaggctatcgaagatgacctgttggtggacttcgggaccaaggtcgaacgcccgtcctcccccgtaatggccaaagcacccctcttgaaacctcttcccaaggtcgctgcccggatacgaaaagcttctccgcccatacccatgccgttctctcgagcgggaagcgggagtagcacgcctataggggatcaaacggtgttcctgcccgatattacgataagggagaaacccaagcacagcggtacggcaggaggattatcgcaagagggcggggctaagaaccagccggcgaagaagacaaagaaacggccgacggacattgacgacctctttggaggtctaagcggcggctctcaagtaggcgagaagaaacgcaagctcggtaaaggcgtagacgaacgtcctccatcatgtacgccatctgggtctgatacggaacgtcagggttctcgagaggcgtcaatgactacgacgcccgtcgtcgaacctgatgcggtaaaagcgaaaggtagaggcaaacgggtcgaggaagcagcaaagctaaagacgaaaaagaagaagaagaagggggatgatctggatgacatctttggattctgatgtatccctgggtcatctcgctacgtatgaacatagtcatgaagaagtctttgtggacagtaatccacgtttatacggaaagcaataccaacccgggtttctggctgtggtgacatcgccaagtcaggccatatttccgtgactgacacgatctgtcaaatcatgaacgcctgcagatgcgtcgtattttgaaatagtcagctagcactgatggaattgaacgctcgtcagccctttatgaagacgaaggcgaacctgtgtcccgacctgcaggaagtcacacagatgacacatgaaggttgactcatgccgttttccacttttgattccgcttgatcagcaatgacatgattaatcagattaggtgcagcgagcgatgctattcccaggacattcaggatatataacatccacaatcagcatagtccagtctggccagtctatatcgctatggtctcgggtggcatgcgttgattcatcgtcctcaataactcttgactcgattgccaagctggatcgtgctacattggtcaccgcagcaagcgcacagaagagagccgccggcctcctccgacctgcctttatcctcacgctcatagctgcacttctcgcatacctttgttacaaccggtttgtcaccacgatgacaaccatcgacatgccacgagctccagtctattttatctcccatggaggtcctccatcgatgtatgctgcggagagcggtccatactctggttggaaacgcgttggggaactgatccggcgggatatagagcaaggcaaggttgacaagagtaaagggttcatatgcatcagcgcccattgggagtcggacgataccagcgggaaaaccattgaaagtgagtttcatcatccgcatggcttcggtcctatgaacatggctaaagttgctccactctggttctagtcaacacgaacgggaagaaccctctcatctacgattactacaactttccgaagcattactatgaccagacgtttcattcgttcggaccggctcagggaatcgaagtcatcaacaaagctctagaagtaggagggtggactgtcaagcgagtcgataggggcttggaccatgggttgtttggcaagtcgtacggaacgtcacaaaccattcgaagctggaagactaatcatatcaatgctcgtcctgtatcttgtagtccccttcaagatcgccttcggccaaccccctgttgatcattcgagcccgcccgttccttcttcagaaacgatcgacctcacgccgcacttggttcaggtctccttgcccggagattctagcccggaaacagcggagaagttcggagaggtgctgggcaagctcaggcaagatggatggggaatcgtctgtaccggtcaggccgtgcacaatctgagagacctgcgtgagtcaggtcatacctagattttgaagagggagtacaccttggctaacgtttttcgttctcccggccgttcgcaatgctaacaggccacgctcgctcattcggcggtgaagggacagcttacagtaaacccttcctagacgcgtttctcgatgccgcgacatcttcacctacaatcctcggggaggcgacaaaggcactcttctcaagatcggattatcgacaggcacaccctaccccggaacatctcatgccgatcgtcgtcgcggccggggccgcgcaggtcttgccgggagcaggtaaaggggatgtcatctttcaggaagatgatgggccgatcggttgggccatgttgagatgggattgaagtgggatcgaagttcggaattcgcatatgtgtgcgatgtgagctatcgtatccggtcaccacttgaaggcgtccaatgtcggggactgaccggtcgctggtatcgatgaacaagacctttgcttgtatgcaagccaaggaacgtgtatgtgtatcgcttgtaccacatagaaaagataatacaaaaagtccttttcgttgttacacccgggttcaatacaacttgcggaaagcacatctctattatagtctacgatcgagccttttctcacttggtcaaccagccgaggtaatcggcgacgagcagggtcaccatactgtttggtcaggaggatggtcttgttagcaagcgataagaccgatcgattacgcgttcgcaatgtactcacgcatgcggtgcgatcctgacgtagtacgttccaaagccacggtaaaacctgccgatgccttcctccctcgccaccttgagcgcggtaccgaccataccgacccgtttgccatcgacgacgttgccacccttttgcatcctcgtcttgacaaagtcgaacggcaagctgaagaagctcgcaaagaaccctgcgaccgccgaactggccaaggtctgctgcatggtcgtcatcgagtgcaatccttgacgttcgagcttggacaattgggatttcgtctcggaaaagaaggcgagttgaccaaagttgagggccatggcgcgggcgacggtaggcatggcaccgctccacagcgcgatgacaccctccttggcggtgatatcggtgagcgcgtggaagacgttggtatagttggcgcgcatgtgagcgggtttcaacccgtcagattgcatacggatcagagccagatcggcggggttgcccagcatcgcagctaagacggggtgaggggtcaagacatcaatcagttcactgagcaaaccacctcgacgtggagcacaacgcacccaatcctcctgccgataatccagcgatcgccctctccttgaacccgacttgtccaccctgagaaagcttgcccatgaaggtgtcaaacaatcccagacgggcggtggtgtataccgcctgtctcaacaagccggccgagagcccggtgtacagttgagagactggcatggatcgcgcgatggtcaatgggttggtggattgcccagcggacgaggcgagttggattcggacctgataagtttgatagcgcagtcttagctcctgggtttcctagggcaccgagttgtcaggcttactttgaccatgtcgataggttgaatcactgcagtagcctgatgaagcgccaatcgatataatcgaaaatcagctttctcgcccaacccacctcggggctctgggccccgttgtcgcgactcacgaccatcccgctgatacctccgttgatgaaaggcaaagcgccgacgatccaaggactcttcatcagccccttggcaccctccttgactcccgatcccgaggcgcctgccgcggtggtcgagaccttccgggcggtatgcgcggacgagtagtaaggcgtggtagctcggagggacatggctgattctttgatgctctggatggaaggtcggacggctgaagaggatgcggcagcggagaggaaggaacggtcggcgttggacgttgggctcatctagatccggggatcggacgtcgcaagcaggcaggtcgagaggaaatatgccacggtcagcgatctcaggtttcagaatgagaacgacaagctttggaaaggccgactcacaatcttgatagttgtcctgtttttggttcctacgcgagatgttgtatacccttcaacaggtcagtcttgccctcttatatatctacaaccatccccgccgatcgaaatcaaatgtcgaaacggggtgggacgtgaaaggaaaggaagccatcgtccgcgcatgatgcccgagccggatcgcacgtcgcgggagggttcgaaagcgcgacgggccggataacggcgatatcccgcacggagtcgatattcaccaaaagggagagggtggggcagaacgaagagcgaacagtgagaggaaggagagtcagtatgattattggaaacacatccgtgcgatgagtctgagccggggggtcggggaacgtcgtatgagatcgccaaggggggctgggccgaacaagaccgatctggccgcgcgtgccaggtcgtccgtgttttccgtcgaccccgcccccgccccgtcgcgacgactagacgacgacgcagggcttcgcttgacggcaagatcgaagaggtagagcgagccaattggtattcggaccggaactcacgaggtattgaccttccgtgtaggatgtcgtagtgacggggtcccgttcgactaggaaatgatcgtgaggtgaggcggattgaccggcccggggcagatgaattgaagagcgagagaagaagtgaaacgcgcgcaatgtctgatctggggtctccacgctcgaggttcgagtgtatgagctcggatttgttcggttcgtttgaggaatgagatttggtgttgtcaatcgatgggcatgacaagcatgaacacggttgcatatataacagggccgtacgtgagcagtgtagccgggttcggaggattcaggagcaagctaggcgggtcaaaggcaggtgtgtgtgtgtcaacaggcgaccaggtcaagtgactcgagggtcagtggtcccatgatccaacggctcttcggaggaaaccgagttgacattacgtgagaaggctagataagataattgtcagtctcgtcatgcaaatttagatgtcaatctcactcgatcaccttcgcgatgccgagtgttcggcaaggatggttcctcactttgatgacggtatcaattacacctttgcttccgggacccctccatcgcccaacgtgctgcttgcgacgctctctagcgcggagagaccaaaaaaagatgatcaacattgcccccggacgacaactacttttggcccgcgacgggacctacttttcgtcatctcgggaatacacttgattgctcgcagatgaagctgcgctgcacttccgtagctttagcttggatggcagctagccctaagcagcaagtagcgtgtacggagagggctacagatcgtgttaggaggaccactggcgtatgtagcaggaaataattcgggaccggttacatatagccgttcagcacggccacggcgatcgactagatcggcaaacgtcaaaagggtatcacgatgggttccccggggaggcgtaggcctcgagcttcggttaggcgtatgaatatatggaacagtcggatatcgctccattccccatgggctcctcgatctcgtccacagccccacggaatccattcagtacgatctagcttgtgattacttacacctgacataagaaccgggaacatcatcatccaatatcgagttgtcgtttcaaaagcgatcctgaagcttgtgaacaaacgccagaggaggagcgaggagagactcgaccaaggccaaccgatcattcgatcgccttcgaaacaacattcgtcccatctcataatcacaagagaacacaagcatcagcaacagagatggtcgaaaccacgccgatactctcgcggaagactttaccgttgacgtgtaagccaggtctcgaggacgctcgtcctgtcgcacagaaccgatcacttatcccagcttgtaccccgaatacagcgatcccgccaggtggatcgtccgagtacgaagcttgggtggagagactcgttgacgatgggctcgccgtagtaggcagcatgaagtcagtacctatcgacttgatcatagatgcttagctccctcctttctgatgatgaccccgatcgaacgattccgtagccgctggcgtctctcgtcacagcatcagaaggataccgtgcagacgtatgtcctgccatgtcatcattccggaagagatgccacgtccgatcgacccaaattggccgttcacgatcacgagctgtgggcggggagacggagcttgcatttcgtggctcggccatctgcttctggatcggcgaatgctagtcgacgaggcagtgccgcgggactgaatcccgaggtgggtgatgcggacgaggaggacgaacaaggggacgggcttttcgaagctttcgagcaagggttgttcgagcggcactcggagaacgagaaggagtacatcgagagtctgcgagaggtttcaagagtaggggtcatctgcgaaggagagtccgaggtgtggaagtgtgtctatacgatgccgtgagtacagccttctcgcccttgtcttgcgaggtcggctgaccgagctctgtcccggtatggttgccacaattagctcccctctcaactcgaggacgttcatgaatctgttgatcacaaggagattaccgactatgccgatggatttgccaccgggatggcatacgaatcaccctccaccgccttgccgacagttcatcatcatcactctccccgtggatgggccgtcatcaccggacacgtccacgccatctacaccgacctccccattgtccccttcgagcgagaggtcgttggacagtccatcccactctaaattgaccggcgggaaggaaaagacggtccgagctcgatacgtcagcgtcgaatgggtcaaagaagtggatctccagttgactggtttcgagcatggcgaggtagacggcggaccgagggtggtcagaggagtcgaatgggccatggcgacgagtagtagcgctggaggtcagtcgcatagcgttacggatatgacgctagttcacgtttgctaacgaagcggtgctatgtacaggaaacgtaccacaggccgtgacgaacatggcgcttccttccaagattaccgaggtgcgtgcccgtggacgatgtgacggaaatttcaaacgatcgctgattttcatcacttgcggaatcgataggatgtgccggcgttcatcgcttggatgaggaaacagaaccctcagcttggcaaggtggagagcaagcggttctaaaggtcccagtctctgaaacagccacgcagtgggtcttgacttgcgctagtggccctcgcttgaccctcgatccatcggagagatggaactcgaccaatatatagaaatgtgattgctcataatatatctacctataatcatgaagactgaatacattaattcatcattgtagcgtgatggtgtggctccctcgaatccccatgccgtgtagagtgtatttttgaatgatgaacctgcgcttgcagtctgctaatctagccgcactcatgagctagcgttcggtccggtctcaggattagccggtggaggagggggtccttccactctgtctctgatgaccatcacagcaatcattgtccgatccagtttggctggtacgtttggctggcaggcaccatatgtttggcgatcgcttgacgatcgcaaaacacgcctttgcgatatgatgccctggaaagcggactaggtaaaagaaattatgtccgcgcgcgttaactgatgcgggtcaacgatcaatgcgtctcttgccaactgcaagtcgaatatacgattgtcgaatctggatagagtacctcaaaagttaccgaagcaggtgaggtccgtatacaaggagcaaatcagtaccatgaatcgagcgcctaatgatgcaaattctcagcgcgtgctgttcgtaaagaacctgtacgtatcgtccgttgacagctctccttcggcctttactcacgctcgccgatacgtcgatcttgtagaaactacgccatcactggagaagacctgtacgatctgtttggaaaatatggagctatccgacaggtccgtctcgggacggatgctgctgcaaagacgaagggaacggcatacatcgtaagtaatgcggcgagatcaaggtgatggcagcctgctaaatcggtccattgcttggaattcaggtgtatgagcattcggacgatgccaaggaggccatgaaccacttgaatggtttccacttggccgaacggtatatcgtcggtgagtaccaagaccgagctagtggatgcgttgcgatccaggtcagctcatcgcggttattgtcgagcagtcctttaccatcatcctacacgtcaacaacaagctgtggcaaaggccaacgaacttaaggagcgagaagaagctttggccgaggagaagaagaagctgggaatgaccgattgatcagccggcttatatagcggctcaaccgctgggaaatctacttgcttcgacatcgccgctctggaactagaaatcagcctcgtcgggattcggcgagaatttggcatgtaccactacgaatccgatctgcccatacaagttgtatcaatctgtcgccctcgcaaggcgatcctacgcatattcagtacattttcggcatatgatttactttcctttcctgccactagatcgacttcacttgatgtaagcgataggaagcatggtcggttcccgcatggctaagatgaaggcgaatggctcgatcaatacgttgatggatattcgagtattcgcgatcaggacttactgatacacttggtctgcgtgaattgcataccagcggcttgcccgttgaaccgtccgaacccagagttctaccatcaagtcacgccctggatgagctcacggaccactctcgtaacggatgtcaacgatggcgacgcaccttcattcctccatgcggcaagttgggctcgtcgtgcaccgtcatgctattgatatgtacggcaccactctcgatccgcttggccacatccaagcattgcttgtagtttttgccccacacgctggcgcttagcccgacatcagagtcgttggcgatacgtatggcatcctcgacatccttggcgcggatgacgatgagtgaggggccaaaggtctcttggtggtagatgtcgtgggtagaatcgacccggtcgatgatgacgggagcgtgcgaaatctcgttgtccttgggagtgccagcgacgcccttgatcaagttggcgccctgcaaaaagaaacaaggctgtcagcggatcgtgatggtcggtgcaagctaagagaacccaccttggacgttgcgtcctctaccagcgtgtgtagcttgtccaccccagccttgttggccattcgcatccggtccaaactcccgaattcacctgcagcacaagcaatcgattacattcagttttcagtcgaccgcgcttcatgtctgccacgatactgactggctacgatcttttccagctcttgcaccagttcgtcggccacgctctctaacacgacgatcctcgccgtgctcatgcagatgtgcccgctgtgcaacataccgccaaacacgatattattggcggccatggccaggtcggcgtcttcgagaatgaccgcgggggcgttcccaccgagttcgaggagggcgggtttgatgtgtttcccagccaacgagccgatcgatgaacctaccgtgatcgagcctgtaaagttgatcatctatacgattcatgtcggcatgatcagcccgtcgctttgtcatgaccagaaagaaagtcgatacgaggcgcgtctcaccttgacatcagggtgcgcgatcaactgttctgtcctctccggttccgttcccggtccgaactggaccatctgcagaacctctttggggacccctgcttcgtgcatgatcttgcacagttcgtaatgcagcgtagggatctgttggttggccttccatatgacggcgttcccacacgctagggcgtagcagaacgctcggacaccgagagtgatcccaaagttgaacggactgacaagggcatcccgggagtgttattggacatgtcgtttccaagctagaaaagacacgtcggacttgcctgatcgccaagatgacgccataaggctcccgagtcactaatgccagcgatccgtcgaccgttggggggatctctccctatccagccgagacataacaacgactcagcctgcgccgtatcataacttagctctcgaactgtatctctcaccttcaactctgtcgtcctatcgattgcggacaaagcaagtcggtctcgtatcataaaaagaagaagacgagacaatgactcacaaagccgctgcgctcttcaagtgttccacagcgaacgccttgtccgaagaaaagacgatgggcgcgacattggtatccttggcatacgccggggcgaggacatcgtcgtaacgctcttcgacgagggtcgctgcctgtcatccgttcaaggcaggtagaggatcagaattgtacgtgaaaaagcgaaagtctgacagcggttggaggggacggaccttgttcatgatatcgcgacgtttaccggccggcagggctgcccattctcgaaaagcgtgctttgcgctttgtacggcgttgtccctgagcatggcggatagcgagggcgagagggtcaggtgcggattcgggcatgggccgacaccgggcttacaggtcttccttggaagccccatggaccttggtgaccacctctccggtacgaggatgtttcacgtcaaatgcagggccggatctgttctctttcccgttgatcaacaagggtacggcttgctcattgcgggcggtggtcgaggtatggatgctgtagacgctcgacaggcgggacgatgcgggtcgagcaaagagtgtcttggcaacggtcttgcgtcctgcgccgaggagggtccttgtgggcaacatgatgcggggtgatgactagaactatggccaaggcgatgagaatgaccttgaaacctggtgactggtagtagtggtggtggtgaagtgttcttccagacctgtgtataaatatatgtgtcattgactgcatgcttgtacctctttgacgatggaacgagcgatgtggaggtggggtagttggttccaactcgccgccccacatacgcgcacaaattgcttccgaaacaccgactcgggttgccccgctttcatttcgatcgatcggtcatgaccatattcacattcacactacgactggactggactggactggactgagaaaggacatggtagatggatggtatcgacagagttaacgcaagagagtagtcgcaatagactttcaaaaagttcgacagggaaacaaaagattcaaacgcccgtcccgtctcgtcgcgtcgcgtgtatgtatgtagcagtagtaatataaaagactcaaaacagtcaaatcgtattgtcgtcgttgtcatcgtcgaggtcgtgatcattcatcgtcgttcgttacctcctcctctggccccatctccagcttggttctgaccgcccggcgtctgcgcccccatcggtgcacccatgaccgatcccggcatagagtacatcccaccgggggacatcatcccctgcatcccaaatcctggcatgctcggcgcgtaaccaccgtacatgctcatataagggtttcccgcgcccggcatcccaggcatcatgggcgaagccgatcgggcgtcgaatccgttcccaagttgaccgccaccgttcggaggtccgaggtcaggcgtaccgacttgggaccccgcggcggacatggccatgtacatcgagttttggtaagccatctgagcggccatcatggcttgttgttgcgcataaggattcataggcggggcgggccagtacatgcccggattctgcttcgaggtgggcgccatcgtcagctccgttccatcttgcgcgttcagcagggtgcgaaaatccaactcaccccgtaggcaagaccgggagacatcatccctccgcctggagcaccgccgtaggcgctcatcggtcgagcgaaagcgtctccgccggggtacatgctctgtcgttgcatgttctgcatgtcatcaatctgccgttgttgttgttcctaaaaacaagaggccatggtcgcatcagtacgacgtcgtcgttggcaaatcgaccccagctcgttttcgttcaactcacggccaatcgtcgatcccgttccctctcggtcaaagcggctcccaacccaccagcagccttgcggtccttttcatgggcggtgatcgcccccagcaagcccatttgaggctcaggcggtttattgggaacgttcaacaacgacgctccagtctccttggcgatctcttgctgtttcttggccgaacgatcttccttgtcctgaagtcccgcttgcaagagtccatgaggagtgaacgctttcgtcagatgggcaggagcgtcaagagtgacgaatttgccgtttggatttatgctctcgtctttacccgcgtgaggtgcgtcgagggcagatgtccatacgctttgacgggccgaaggtcgcgattgttgaatagcaggacgggccgtgccgagctgattgagatcttgatgggagggggtatagccagactcgctggcttgaggagattcaccggtccacgaggccgaacgttcatgtccagataactgggggacgtgcaaaccgctaccagcgtggccggcaaagttcatgctcgacgaccgattctgctcaaaagtagaatttctcgttccaggaatgggaggaaggttccgtgagacacgacgttgagctccgccttggtccacgttaggaagaggccgcgctagaggcgcgcctcgaccgagagccgaagcgtcgttgttgactcctctgctaggaggagttcccgttcgctgacccatcgaacgcggagagctagttcgaccagcaaaggatccgggccgactactgtaacccgatcccggacggctgggaggttgcaatacttcgctggcatccgatttgtcgccatcctcatcctcatcttcgtcctcttcactatcttcctccgagctcgccgaccatgctgctcttcggccagacttgccaccggccttgcctggacgcgtcatgacatgttcttttcgcttttcggcctcctgcgcgcgttctttccgatcgatagcgctctgggtcggagcaaaggaagatcgaaaggctggctgagatgtaacggtggcagcaggccgagccgtcgcttgtgggctggctcgtacgtctggcttgccgggtgagggcatggcatcaacaaagctcaaagcggccagggcgtctgcgttcatgctggccgaatgaggtaggtgactagcacgatttgatctctgcttgggtgtgaccagattccgctcggccgcgtctgacgtaggcggcggagtgaccttcccggcctccatcgtgggtgataacgacggcgccgaagaggtgaccgaaccttgtctccccttgggcatagctcgggcgcctgacggctttcgtgccaagccagctcgggatgctgtcggcgaaacggacaaggcgttttcttcccggtctatgctggcttgcgagacgctggaagccgctggcgcatccggctcctgcaactgaatttggtcgagcagatagtgattgtcctgcaagacctggtcttcgtcgaattgatcgttcgcttttcgaggcttgggcgcaacgacaggaatgtcagagcctcctgatcgatcgcgttgatgctgtatagtaacttgctgaggaacggcgttgtcgatcggcaatgactctgccagaggtactggtaccctgtctcgccgttcgtcttcctgagacgaagcatgggtgtcaaagctcgttacgcccggagagtagacactgacgctcgagggtgccgggttcacaggacgcgagccgacgctttgtacccctgtgaacactgacattgtaggtttagaggcgttcttttcgttaagctgagagcctcgcagactggaaccggtcgagccagatcgcgcatgttgttccccgcgtgaaacgccatcagacaacctctccttggaatccgaagcctcagcgaccatagcagtctctaagcgattgctgaacgattcacggcgagacagatactggtcgcggttcgatccggagcccgacgtcggcttttccttggacgacatgctgcctcctttcttggcgagcgtgcccaatgtggccatgctcggagaccgcgtgctagcgacgtaggagcgctcagtaataggcgtaagggtcccgtcgtctcttctgggcaaagatccgcttgaagacgaggacatcatacggggcacccgaggggcgtcttcataatactcgttatcgagtgtgtcgtaatcacgaccgttaccgttgcgacgttcatcgtcgccctgagagctgtggaaagaggctggcgagctagacgaagaaggtcgtgcgagaggacctcctgtcccagtgatgggcggcgaatcatgagggttggtcaaggcgaagctttgtgaaggggttatagaaggtgacgccgatccagctcccccctgtttcagattgttgatggtgatgcgtgtgtaagcctgacggacgttggcaataacatcctggcgatagtcgacctcgagcgcttgcgccgggttgataaagaagcgctacatcaagggatgctctcaatccctgctaatcgattcggcatttctttacgactcacgctcatctttggatggccgtagtaaccaaagaacagcgactcgggatcgtctcgatcccaattgtagtgtttcgatcgaccgtaaagtgagaatgcatcatggaaacctgaggaaaggattgtcattgagctcttctagaagccggaactgccgaacgggacttaccaacgacccatttcaaaagctctgcgacaataccagcatcgtccttcccgttcggactgactggcaaatcgccgttcaacttttcaggcatgatcatggcccagccggacagccggggtcgtccttctacgacgaccaagctcccggaaatattgcccaccactttcaagaggttactcgacgtgatgacctctagatgctcggggaatacggcgaatctgaatgatccgtcgtgacgtcagtctgcggtttcaggtgcgatccggcaatcgactcacgcctgagagaccttggagactgtcaacaccggttgctcagggggttgacttttgcctttaccagtgcccttgacagtctgactggcgtagaacagagccgttcccgcctccttgactgcaggcccgccaaactcgttggtactcgccacacccgctagagaagcgttcgagttttcattggagctacccccaccaaagccaaagatgctctttctcctcttttccgccgtctctttgccgacttgagcggtagctggggcggcgagtacgagccagagtcgtttccattccgtaccgcccatgatcctcacccggacccagccttccattcgacccctgaccagagggctatccggctcattccaggaagccctttcccccgagttcgcaggcagggtcggcccgccccggttcgagctcctcacaaacgtctgcaagagatgaccggtgtagatctcttcgatccgagatttctcataagctgccagacgtaacgaagtgacccagagggcgagattgttttcgctacggcatgaaaggaggatccggttagatccggccgtgttcaacgaaaagacaaaggggtgggaatgtgattccgctcgatgagggggcggtggcaggggagccagcaattccaaggaagaatctagagtggcacaagttcagttcgttccggtcaacctcgcctatccaagtagcacgtctctttgccggtcgatgactcacccgtaacgttgtaatacgtcggaggcactctctcaccccgcttgtccgcctctttcgtctccttcatgctccacacgctcaaacttgtcccgctcaattgcatccacacctcgtcccagtcgttcctcggacttcccggtgtaccctgcttgggctgacccccctgaggcgtccgggcaaagatcatctcgacctcgggcggagaggctccgtacatctttttgctgtggagttggatgagctccatgagcggggtgaagacacgttcaagggccgggttgatcgtgctcggtcgacggatggggagttgttgagtcgacgtattgcgggtctggggagatgccatgccgggttccttggagtgagtctggggggcgacgacaggggaagatcgagcatctcggggtggtagatgggtattactggatccgttgaacgagtcgctgtgaatgctcgacccgtcgtgcgagatctttggactcgagcggaggttgggggagggagcgagtcgtccaccgtgagggttctcttgaccgttgttcgggtactggtgatgctgctgctggtattgctgttgcttcaaaccgttcagattgagagcggattgggatccggattgcgtcctctggctttgcatcgaaggccgtccattcgtagggggtgacacctggctggctcccatctgagacgaaaacgattgacgacgaccagcaacgccctgcccatatccacagcccggtcatcagcatcgcgctgcccaaaccctacatcttcagctcatcagactcacctccttgtccttgtccttgtccttgtccttgtccttgtccttgtctttatgacccccaatatgcataccaagaaaagtccttcgtttcccagacccctgctcgtgcttttcttgtccatcctttcgttgtgcatcatcatcgatcgtcatgggccgacctttgacgacctgatctttcatcggaggcaacgacgcttgagaggcagatcgacctcggaacatggtggtcgatggatatcgcccttttcttcgactggtagtctgtgtggttcggtatgaggacgagggagtatagtcttttttttaggttcggggttggacgaagtcgttgttcaggtggttgatcgataccaaaggcacgtgtacccaaatgcagctcggacgtaatcgccagtcgtcgtcgttggcctcttgatcagatttcgagctgggacgtgcgactagtcttgtgattgccgggtatcaggaataggtcgtgatcgatacgtcccaacgtacgtacgttccaagatctggtttcttcgggcgagagttcgtatcgagtcgtcagagcgtaggacaaggtccaaagacacaagggagaaaaagtccgtggaatgtgcgggtacgtcttttgcgatcgtcccgttcgacgttgggcgatatcgagcgagcgagatcggaggaggtacggagaggtatcgtcagggatcagggatgagggaggtcaggtatgttcgacaggcataggatgtatgcttgtaagagcgacaacatgtctctctctgatctctgtagaatgaatctgtgacctactccagctaccatctcgcgagatccacctttgccttgcccgcccctcgcacagccatggccctgacgtcaagataacgtaatgctgcaccggaagcaaaacccgacaggaacgaaaccaaacatgatcaaataaccggggtatatacaaccaaccaaaccatcacccgatcaacaatcgaaatgaccaccgccactgccaccgcctcttcagtgatcgtagcgagtgatccccccccccccttcttacgacccttctccaccgctctcggtcgtaaattcgatatgtttcctcacatcggcatccgtgaccgtcttccggttgacctcgatcgcctttttgaaatcgctcaggctcaacttgggttcgagcaattgctctgaatcgacatctgtccaccctcgttcgatcgcaccgggcgctccgggggaacaaggggtgagtttacgggtcgtcgtcgatgggtcgtctggcgaggggacttcgacctggggtggtcattaacaatgatgatgatcagcccgggtgggtcttttttcgacaatcaagtgagagcggctcgcgtgactgacttctcggaaatgcgtcgcactcaggacttttcggacgggctgcatcaaggcatcccgtacgatgacggcgatatcactccccgaatacctgtcacgtcgtcgcgccggcaacatcagccctggatgcgcgtcccggttttctcttccgccatgcccaaaccgagactcacccttcggtcatacccgccagatccctccaatccttttgccctagatcacaaggcgtgcccccgacgttgagttcaaacatgcgtttcctcgcatccacatcgggcaaggggatgtagattcgcttttcgaaccgacgtttgatggccgggtcgagctgccatgggatgttggttgcaccgaggacgaggatacccgtatcatcgtgtcctacgccttgcatctggacgaccgtggcaacgcctgagtatgtggcgctttcgtcagacgcacgcccgcgtgctcacctggatgaggaactcggtcttgatcctccgactggcctcactctctccctctccacgtgcaccggcgagcgaatcgatctcgtcgatgaagatgatggccggtttgctctccctcgccatctggaacaactgtttaaccagcctgtttgtgcgtcaaggtcgtcgtcgtcgtcgtcatccattgtcagctcggaacgggagactcgaccgggactcgccatcgacgtgacgtcggggactgacctttccgactctcccatccacttgctgaccaagtcactcgaactgacgctgaagaacgtactcttggcttcggtcgcgacggcctttgccaggaaactctttcccgtccctggaggaccgtacaagaggatccccttccacggcgtccgtttccccgtaaacagctgaggaaacttgatcggcaggatgacggcctctttgagcgcctctttggcttgagcgagaccggccacgtcggaccattgtacgttgggcgtctcggagaggatggccgcggatagtccggctcgcatctttttcacctcggggtcgatatcctcggtcgcaccttcacccgactcgcccgccccggctcctccacctccgaccccacctgccccgctggatccgccagaggacccgttcgcaccgaccttggcgcgggaccgtttctcgtcggatttcgacaagtgttccttgagcttttccgcgcggtcgaggtattccgtgaacttgttacggatgagcgctttcagcttgtcattcttttcgtctgcagtgccggggtcagcacgggcgatgcgtcgtagcgacggacggcccgatagaatgatgagccccgtgtccctgcggtgtgtttatcgagggcgtgccgactcacacttcatggccatcaaaaagtaatccaaagaactctgataattcttgtacgcctcctacgtcccatccacccattcccgggtactgtaagcccgcgaccccggatacgaatacgtactcggagacgacgaccggctcaccgcgtattcccccttggtatcatactcgatcgccttgcctacgatttcgatggctttctgtaccgcgcgttcgggatccagcgggagtggaccgagggtgggcgtcgatggcgggtgagagtgtgcatggaggttggcagtgtcgttaccggtgtcaatgtcggtgtgggtgtgggtgtgggtgtgggtgtgggtgtgggtgtagttgaaatcgaggtcaaagttgggatgggaaagcgtcaccgtggtcccgtcggggaaaccagaagggtcgatggccgtggtgcccagcgagttgatggtggacgagtcgaggtcacgatgaccatgacgatgacgatgacgacgatgcaccggacgaccagatcgacgaacaccagcaccaacacgtccagatcgatccacatggtgcgtccgaccgggatcgtcaaccggattcacaggtccgtgttttatgggcatcgtgtattgttttccgggtgcgtcaaacgatgatgatcacacgtcccacgtcgagaaggggcgggtatcgtccagagtgtcgagtgagacgagcaaagtagcgagttatggccggtaaatggttgggtcgggggtatagatggcgatgaaagcaggatagtaggagatgatcatcagcgttccatccctcgtctatctgggggtcctgccacagaaacgattggcaggcaggcaggcaagggtgaaaattgcgaatagatgggtgcgtagactcacatcgagaaagttggagttgctcatcctgaccaaactcgccccgtaatgtagctctcggtcggcgttggggtcggggtcgtggggtgttggtctaaggggaggagacggtagtgcggcggcgtagtcgtccctttgagcgacaggaggtgtcgggggtcaaataaagggagattaaattacgacgagttcgacgacgacgacggtgttggtggtggtggcggtggtggtgttggtgattcctttgacgacgatgatgatggtggtggttgccgtgcatgtcgctcgattgttgtcgatgaggtggagagagtagtgtcaaggttaagggcggggtgaagggagcaagagaggcggagaggaggaggaggctgttcggaggtaaacattacgtaaattgccggcaatcacgtaaacgaccgtcactactacggaagtaaattccaccttacaggggctaaggtgacgccagctacgagccagcaagtaacaactgagatatgactctacttcctactctactatctgtctgtacatctatcaatcgacaatcttgcgtccccccctcgtccactcgcacagactaccaactcctacgtatcgacatggacacgtacgacgatcctcccaaccccttctccaccgacccttcaccgagtccttccagggatgaaccgtccactgcgcgaggtagcggttcgtcatcatcacctcgaacaggtcaacctagcaccacgtacccggagttgaatatttatccctcgaatgacgatggggatgacgaggggctgaggtcgaggtcgacttcgcatcaggggttcggaagggatgacaagcaggacgatgacgttgacgacgacggtgtcaaggggatcacggcggggtaccccgaattaaacctctaccctacgtctaacgaggaagaaccttggtcctccaccaccgataacaacaacaacaacaatggcgctcaacctgttacacctcatcgaccggcccccctttcgcacacctcgaccaaccagaccatcaccaacgccaacgccaacgcctccccacctcccccgacgtaccgcccgtctttccccaacccaggcgcaggcatcaaatcgtacgtcgggcccaaggtgaaagaagaagcctgttgtgggatggatgaagagttgcagaacggggcggacgtcttggtgagtgtggcgtggcgatgtcgatcgcatcccatcggatgaaaggctgattcgaagtttgatcgtccggataaccctttcccccccactccatgacgcaaatgacatgatcgacccacggggagacagatcgtagacgccgtcaagacgaacgatggaggtagagcgagttatatcacgtatgtgatcaggaccggagtgagtcgcttcatcacgctcgtacgcccaggcgatcgacaactgacgtgccaaacacctcgcttggcgacctcctccccggtgataagaaccgggaaacgcaccatcggtactcccactttgactctctacgtacctcgctccaagccctctaccccgtgctcatcgtacccccaatcccttccaaacaatccctcacggactacgccgtcaaggggtcgagcaaggcgaaagaggacgccacggtcatcgccagacggatgaggacgttggaggatttcttgaagaggctcgccaggcatccgatcttgggcggggaacacgtgtttcataggttcttggacggggtttccggttgggtgagtcgggctcgggtcgggtcccggggcggcgcggcgcggcgcgggggttgctatagcctactgtacgaaggctgacgctggggggaaatgcggaacagaacgacgtgttgcactctccacccttgtcgctcttgcccaagaaccctcttcacgcgccgacatacaacccgacgatcaggcccgctcagccgttctcaccggcttcgccttcccaatcggcgacgacggatgatctacagcaggaagatcccatctcgtcggccgtcacccagacgaccgcaccgggacctccttcccccggatcaccccaagagaccgccgcggcgtcggcatctccctcatacatcgcgcatcaccttttgcccaacgtcagcgcggccacaccgttgaaacacccggacggcaggttcatggattcggaagcgtttaccgacaagtttgcgcatcacctctcgagcgtcatggagcgcgtcaatcggagggtcgtcaaacggtggggggagagggcacacggggcaagcgagatgggcgccatcgtcaacggtctcagcctcgatctcgatgatggcgcgtcgaaggaattgaccgagggcgtaggcgcagggatgagaggggtacaggaagcagtggaaaagtttggacaggcggtagatgcagagcacatgagcacggccttgttggtgagtccctactccgcccgcgcttgacgtcggtagctcgggacgtcgcgtgttgacgatcggacgaccgcgtgacgccagctgcaacactgggaacgatccgccacagagcctctccacatctacgcacagtacgggcacatcattcgacaacgcctctcgttcagacatcaaaagcatgtacagtacgaactcgtccagagcacgctcgaacatcagcgagacaagctcgaagtcctggaaaaggcggaaaaggaatcgaggcggttggaagaggctctcgaaagcggaggcaggaacctcacggccagcgggataggctcggcgcccgcccaggggcaaagcatcttgaccggtcagagcgtcgtcgggggaagcgtctaccgtgaacagggacaaggcttgtcagaggacgcaccggccggtctgcccaagacgccgaccaagcggaaaggtggaggtgcagggtacggtctcttgagcgccgtcaagcatagtctgtcgggcatgatggacgtcgacccggaagccactcgaagggccaatatcgggaggacgagggataatatctcgcaggtcagtcttgcgcggagttttgggttgaatctcggacgacacgctgatacgtggacttggtcgtcgtcgcagctggaagactcgttgcaagccgccgcgcaagatttgaaatacgctagtcaaactcttcaagccgatctggaccgtttccagcgtcaaaaggtggccgatatgcgggacatgacgctcgctcttgccgagattcatcgggaatgggccaaggccgtgagttgcagacgtcaccgagacggtgagggtataccttgcgccaggccgagatctgatccaccgtctcgctttgaacatgcagaacttgaaggcttgggaagaggcgaaattggccatccaggcgatcgatgcgcatcccaacaagcccttgcagctggaagaggatgaacctcttcggtctcaggcgtcgaccgcacgtctatccccgcaacaacaacgctcgttcaccgtcgatcgatcgaggacagaagtcgccgggacgagcgggtttgccgggtttgcagccaggggtaagggtgatcatggcgacgatgagggaggcgaggtaccgccaccccccgtcgtcaagcaccatcctttgtagggattcattttttcaagcgttcgagggctcgtgactaggttgtatggtagtgtttcgcttgagcttttgttaatgatacaagatgatacctctcctgactcggaggtcggatctggaggaatgggtatgcgcgcggccgttcggcacggcggtccagatatcgacccacgctgcaacactgcttgttggcaagggggcagtgtccccttcaaggcccggccttcgggacccaccgacgcggctgtttgggctattctttaaattcttctcctaaacatcaccaatagctgttagcaagatgattatgcgacttagtacagtcatccggtgcattcccgacctagtcaactcgacccatccacactatggccaccactacgtacccgagagctacccgcttagtcactcagcctatgtggccaggaccggctgatgtgacctgcgaggagctcatctccttgcatccggatcccgctgaggcccgcgcttggcgaggacttgcgtcggccggaaccaagcccgggctaggcgaggagaacgccacccacgaggcaacccattatcgacggatggtcatacaaacctcgagacagaggacccggttcaagactcggcagcgccacacgctttcatgtatcctcgtttcttaaatttcgtttggagctcggcccagaaagaaagaggtctcaggatagcacgagtatcgtcgttgcgtcgtttgtcttgctcccgcccttttacacacccttgctattcagcccttactctgcgcctgtcactcacttgacagagagtggcaaatgttaagaaagatgttctgactctctatttgcaaagtcatctctcattgcgaagtggatcggattgcctacctggaagcatctcgatcactgcgccaggagcgctgccgttggccgttgaccccccggtcgatgttcctgatcgacgtgaaatcctgtgccgggttgtcctggcatactctacacatgtagcccacaaacgttgcctttgaccttggcgtaagcgttcatgatctgcctgtggtcgaggcagcttccgaggtattccacgagattcttctcggtcagggtggcgggacttgagatcgggagaacagtggaactggcagcctcgagttctttctgaagagtgtcgaccggagtgacagaattattgttctttggcgaacaattcgggattgctcgagatattgttgtttgatgatcgattgtttttgtatttcggcggagatcgcgaactctgtttcgcgtttcaggttttcgctgacggataactcatatcgaccacgtgattggataattcctagacaataaagttgaaggaggaatcttggtaaccaaatgtactcgttcttcaaatacacggtcgatgggcaaaatatataccggccaccggatatgtgtggaccgcctcgctcgatagcatctcggacgtcgcacaaagcgaaccacagccggataccaaccaggtcgatgaggtcaacgtaggcaaacagttcatcatcccgacaggacctttcactctccccaccgatcgacatgttctaccacaccggcttcaaccctttccagccccctcgtcccccagcgggtcgaatgtggggttgggtggttggggaggagcaaggtgggcgtgggatgtaaggaagttctggatggcttcgactaccgaaaccgatacataatcaaccccagaagaaaacgacatcagtgccgagttcgatccttgtctccaggtcgtcaagcagaaacaagagcggaggaggaaggccccgtgatgagcgactcacagcgatcgacgaaccgcctcaggctctcgtgccccgaatccctgatcacatcgcccaagcgtctttccagggcttctgtacgtgagatgacgtcctggcccggtcgaggtggcgtagacgtggtttcatagctctggtcatgcgtgtcggtcgaagcggggtcggtaggaatgctggtggaaggcagggagagcaagtcttcgagcaggttcagacggaggaggagggccgaggtcgaggtttcatcgtcggggaatgcatggatcacttgcatgctggttcgaaatcgaggggtcgggctgcgggggaggttcttggtgcttgcaagttgagttcgagtgagagtgaggctggatatgatgatgttgcgatgttgacgatgtcgagaagtgtggtgatcaagaatgtgatccgagttcgacctggactcgatgagctgagactcgtcgcctagatgttgacgtaattctcggcattgtatgttgccggcaatgatttccggagctcgacttgccgaggtggatccatgtggagcacccaacaagagggatcagaaagccaagagattcaagagacgccgagcgtgttgccccacaacaagcattccaccaaacaacaacaaacaacaataacaaacagttccagctgcgactaccccgccgtcgttgcgcctctggggaaaacgccggcatgaagtcgattcggatcttctacgccacccctctttcttggaacccctcacttctagcttcacatcaatcaataaccccgccctcccttcaagctggatgcctcgtacgaccgggcgctacgggatcaatggagggatctgatcagacagaggaatgcaaacagcatgcagcatggcgttcgtaacgtcctttcaacaaagttcagcaccatcgggacatttgaagactcttgatcaggcgaccaagatcgagaccgagcgacggacgtcggcgtcgttgatggctgatgggcttgttcacttataagatggaccacgtcgggctgctcccatcaagccggcttgtacgggcatgctggaatgaatcccccaacatcgacccgctactaccactattctggacttatcaactacactcgctacattctacgctcgtttgcaccatacgctctttgtttctctcccttcctttccctcttcgctcgacttcggcgactcgcgactcgtttctacgctctcatcaatcaccatcttcgccactggattcggcactcttccatcaccgccagtaaagccagtaaacccttacgaccaaattttccgacgtctgcacaacctcgaccgggtatcaaagttccagcgggtcgatatagacgcttagctatctttcgacaatcatcactttagtcttcttctcgccttcggcccgtgtctctgtgcgtcaatcgaaccggctcatctttacgggacacctttcgaatacctcttgatatcaaggccggcgttcgtccatcctttggctggatataacgaccttcctttgatcttacaataagcgagatttttgatcatcggggcgatcttccatcaatcaattgatctgtctgatcggacgtctacgtcgaaccggatagctccaagacaaagggagcctcagtttcaagagcggacctactttgagaacgtcgttcagctggatatcgagtcgttctggatcattggtggttacatatcctttgacgataacggattatcacgatacgctcttcatttctcgtctcaacgactcgactggcaccgactggattcattctccattacaactcactacggactttcagctagtccactccctcactctcttcacctgcatctttatccaccgcccggttcttaactttacgcatactctacggcagcgaattcctggaccgacacgactactactgtctttacgacccacgacatactttgtttcataataaccttgtcgttcctacgacagctgcactagcaattgaacacgatctcctcggagctactatactcgaccacggacaacgataatcggcttgcaaaataaccagactcggatataattgacattcgaccattcttttgtcgatattcgcccacccatcaacatgtccctcttgtcttatcccgccagcacccgccaacgtcgtcagggccgaccgatggtcgcgatcctcctcgccaccttttgtgctttgttccttcaggtcaacctcgtacaggcagccgggaaggaagagtggagatcgagatccatctatcagtcagtctcgtccctcccatcttgtcacgcacatcggaacggtcaggcgagatggaaaagctgattcttcttcccctctcccccccgcatgtcgactccactcactcgttcggccggactcgatcgcacatcagactcttaacggacaggttcgcaccgccttctcccaccgcaccggccctcaccgcagggatcccggaagacgggacggcaccctgcccctctggttctcaaacgtcagtcgggctggcatttcgaggcgcgatctagcgcatgacgtgcaggctgattctgggaatgtgtgctgctcgtagctggtgtggaggtacatggaggtcgatcgtggacaagttggattatatccagggtatggggttcgatgccgtttggatctcgtgagtgtcgacagggtaggctccgggtcggcaaggaaacacagctaatcagtgcgactatgacccggggtttcgtatgcccaggccaaccagcagtgagtatctgtccggttcgagctgtacggtccaatgtcactgacgaattgaatcaaatttgtagagaatatcgacacgacgaccgcttacggtgcggcctaccacggattctgggtccaggatactacacttctcaaccctcgattcggggacaagggtgacctcctcgcactctcggacgcactccacgccagaggaatgttcttgatggtagacatcgtggtcaatcacgtcgctgtggaaccggcggctagcgtgcaagaaatgatcgatcataatccggcactgttgtggcgcaaggaagagcagtaccatgtgcgctgccccatggactatggtaatactaccagcgtcgagcagtggtaagtaccgggtctgatcggtgatttcggtccctcggctgacgtgctattccgtgccaaagttggatgggagacgatcgtttgccgctcgcggacgtcaacacagagcacgtcgaagtgatccaagggttacaaacgtggatccacgattttgttaccgagtttggtgtcgatgggatgcgaatagatggtgggtttcgacgtagcgatcagacgcgattcatgaggcgcatgtcctcattacacccgcctccttctcagctgccaaacacgttcgacccgagttttggcaacctttctgtgcagctgctggcgtgttctgtatcggcgaagtctttggagacaatattgcgtgagtcttggtccgtttttgccactgtgatcttcggctaataatacgattccgctcgcttgttagcgaggctgccgcgttccagtcactcaactatatggactcggtgttgaacgtgagtccgtatggagggctttcaacgaaagcttatctaacggtccgatcttcgtgttgcagtttccttcctactacggagcagcggctgcgttcttcaaccggccggccgagccgttgaacatgtccgaactcgtcgacgtgcattcacaagcgcaaaaagcattccctgtgagtgataacatggatccataacatcacgacatgatcatgggctaaacctgatctgcgccccaggacattggcttactcggaagcttcttaggcaatcacgatttgcctcgttatcacggccttcaagtggacccccgaaccgcctggaacgcgctcgtctggcagtttatgagtgacggcatcccgaccgtattctacggcgatgagcaagagattggtggtggggatctggccggacgaggcgatcccgtaagcctggaacgctcatgggattgtcaatccccttctgacccgtttgatccgcctgccacggcagtataatcgtcccgccttgtggactgctgagaatggcagttacgacaccaccaaagctacctatgtcaacatcatgcaactcaataaagttcgcaagtttctcatcgcctcggacgaccagcgtgaagggaacaggtttctccatagcaacctcgaatttctcgagtggaacgaccatgatgtggctttccgcaagggtcccgtcctggtctttctgacaaacgtgagtcaaggcctctgactcgcagtcggagcgcaggttgattcatccgaccgttgcagagagggagtccatcgcaaccggcttcgatcggtgtaagcagcaccggctggaagggttccgtcgtcaagtgagtcgacgtggcgtctcgttgacatgtctagcgctgacttggggtccaattcagcatcttggaatgcgacgtagccaacatcggatccaacagttcgatcatggtttcatgggctgctgccggagccggaggaaagccctacgtgagtcgataccccggcggactacgagtgacctcgctgacagacagcccaactacaggtattcatgacttatgatgacgcagctgcgaccgggctctgtcccaacatcgtcagctataccaaggccaacacgacccggtctcccagtcggagctctcgggagaatgccgctcgtggctcgtccggccaatccggcgtcgtcggtctcggcctcttgaccgtgctcagtatcatcgcctcgcttcttctctgattgacgagaagtatccacgccatagcccaagcatcagcacagtcgttcctcctccagttgtacaagaattaaatcatagcccctcatcagtattccaatcgcatgttcgtgtcacattggcaggcgagacatctatgtgataagtcatgatccagaagcgcagacgaaatggaaactcgatgcaggcgcaattacacgatgaaaccaggttgtacacggtgagggtgtacggtgtgcaaagccaaaaccagcaggcggaaataggtgcgcggtcgtaacgttgaattcgctcgtcaaatcagtccgagtctgcgcaaggacggaatcagtcggggcatgaagggcggcgacggctcgggacccagactcaccagtgtcctcgggcttgggtcctccatacgacaaccagtcgagctttcgcttggctcgcctggcctcggtcgccttttgctcgtttcgggtgagcttcttcttcttcttgagcttgggctggggaacgtcaccatcggcatcgctaggagcggccgagttggcagccgaggtggcggcggtgttgacaccactggtaccgttggcgggggtgacagcacctcgaggggtacccattcggctaccgactcgcgacggcttgacgtcgtcaaaggcgtcgtcgatgatggcgacctttccgatgtgagtgagtcgaccggcatcgacgttccaaatctcgggacagagagcgttgacgaattcgaggttatgcgagatgatacagacggcaccggcccaatctcgaatggcgatcgagagaccaccgagagcttctcggtccaagaaattggtaggctcgtccaactggcgtgtagacaaggcgggagtggcatcagcaaagggtctccaattcacggccggcgcatgctgctgtactcacgacgaggacctggggcgagttgatcaacgaggcacaaatgacgaccttgaccttttgtccaccggacaatccgctaatctcgttgtactgagcgatatcggggtcgagaccgacctcctcgaacagttttcggatggcggtggccgaaaggtctcggctaccagctccctcacgagacgactccatgtcgtcgaactgggtgaggagcttttggaatccgtacttgatcaaatcctctcgtgccaaccaggcgttgtgcctgtggtccattcccttgaacttgacctcgtactggaaactcttcttgagcttttgtcgtccgaggacctgctcgattcgtcgcttgtcaccgttcttgccggtgatctcggtgtccatcatacgcctgtcatcctcggtcaacgctcgcgaagccttggacaacatttcacgatcgtgtccgtcctggtaacgccattgactggaggtcggggcgagattgatcagcgtggtgtcctgcgtgtcgtcaaaaggccctatacttacatgtaggcgataggagtcttttccaagtgcaagtccaagtggtggaacgcgtgctgggcgacgtaaccgacacgaagggccgggtgcttctcgacctttccttgttgaggcaaggtctctccctagagcgtgaacgaggcgtgaagacgatgtcagccacaccagtcgatcaaacaaacgacgcccgtggcgcgcgagctggacttacggtcaacaacttgatcagggtcgactttccggctccgttgggtccgaggataccgacacgactgctcaacgataatgcacacgaaacgtcgatcaagctgggcttggcggcgccctcgtaggtgaatgtacagttggtgagcttcatgatggctcgggtctgggatcgaacacccatgagcgatccgggaggggggaaggtgaatctggagcggcgggaacacgtcgctggtcagcgtcgagccagtacccgcacatcatcgggcggcgacaactcacttgacactggtggcggccaaggtgtagtaagaccttgcctcgggcaccttttcgacaaacttgctcaagtttccggggtagtaggcgatcttcttgttctcgtaatgcataatgtcggtacagacgttgtccagaaaacccgagtcgtgcgagacgatcatgcaggtcacctggggctggttaacgaggtactgttcgagccaggcgacggattgtacgtctgcgcaagcgaaggtcggaacgcggagattgtcagcgattgcgtgggcgcacagacccggttcgaccctgacgactcacccaagtggttggtaggctcatccaacagcaagatgtcggcaccgatcaacatagctctggcgagttccaacttcatcttccaacctccactcagacttccgaccgagttgccctgcttttcgtcggtgaacccgacctgcaagagggcctccctgatctgttcccgcttggtacccttttcgatcaagttcttgtcggtagcgatgaaatcgatgatgggcaacgtggcgtcctctccctgaagcgcgtgctcgaccatgagcgtgcgcaattgatcctggggagggaacccttcgaccttgccgtccctgatggccttcatcagcgtggatttaccctttccgttccccgcgcagataccgtatcgacgacctcgtcggagacgcaacgtcgtgtggttcaagagcaacagaccaccgtaggcgagcgagaactgaatgtcgcacaacatttcaccctcaccatcgtcctcttcgacctttggcgcgtacttggcccggtcgatgtccataaagacgccacggatttccttggcgaccgattggccctgggtcttgcccccctcgagccagtgactgagcggggaaccgaggacccgaccggtccatgcggtttcttcccacagacgagcgtcgacgaggtcagcgaccatgccaccgacgtattcgaggtgatcggcgaggacgggcgcgttgggcatgtccttgcggagaggcaacgaagggtgatcggggaacgcaaaggggagagggatgtgggggaagatcaacttgagcgcatccttggtggacccggcgatatcacggggaggcgggatgacggcgtcggcggaagctcccgattgcttgaggatatccaaggcggtctgcgcaaacgcacggatctcggggaaagaggccgagctggcgatgttctcgacaccggcgaccaaactcgagaggtacctggcggcgacgtcggggtcacggacgagcttgaccaagtttccaatgacgatacaggtcatcctggtcgtctcggtcgaacgttccttgagcgcacgggtcaggaggggtaccatgatggccagggtgggcgcgttgacctcggcgacaaaggtcgtgttggacaaggccttgatggtcgaaggtacgttggtgggcgaagccatggacgagacgagcgaaccgacgtgggggatgatgtcggcgttgggcaggatcgaacacaacgtggcggccgtctttttcgcctgggtcgagacctcggacttggtatcgtgcatggcatgctcgacgacggggatcactccacccaactcttcagcgacccaatcctcgctcccactcttgaccaggccctccatggctttgagtgcgccgaccttggtacgccaacctttggtctcgtcgaggatgaccttgagcacgtgcatgatctgacgggtcccctcgggagcgctggtcttgacgacggcgttgacaccggcctgggcagacgtcctgatggattgagtcttgtccatgaggatgttgagcaaatcggggatacatccgatcaacaacccttcgctaccctcgcccagacccttggcgaggcgttcgacgaggatcccggcggattcacgctctgccggttgtttactctcggaccacaccttgacgacgtgggggatgtgagcggcttcaaagcattcggcgtgggtctggttggggctcgatttaaaggcctggacgagcgagtcggcgagggatttggcagagagggacgaggtggccaaggcgagcgaggagagttgatccgagaatgacgaggccgggaggggcgagagcgaagctttgccagaggtggcagtggtaggagccatcgtgcgtgttaagcgatgacgagtattatacgtgtggtgtcggtgagatctaattcgacagaggtgattggtcaagccggggaggtcagggtggtcctctttttttgatgacgataaagtgacggtgactcgaggtgtaggtttcgatggattgacgtgaccggaggaggaaacgggagagaactgacagcagacgtctagatgatacaagaagagtggtgtgtgtttgagacaggtggggggtggtggagagtggccgagtatagttagagtagtagttgaaccatggttgtctgtccaattgacctttgtctgtttccaaaatctgctcagagtctcaagctccaaagtttcggaaaaagtgaaaattggaaaaataagataaaaagtgtcagcctctcagccaaaactgcagacaagtacagggtggaattggacgactataggatgtccacagagtcggtaaatatacgatcaacatcacaggaagtcatccttgtaatcccagctgttcagagctggttcgatcgtcgtcgatggtcgaatgtgacacgttcaactcacaactcgatccatcatgtcgacgaggtcgaggcgcggtggcaacgttgaaccatcttctagctcgtccagcgttcatgcgtgccgccgccacgtcgtcgacaacgagcaacgagacagtttcttagctagcataacggatgccatgcaccttccattcatgattgctgcacgtgcaaccgtagactgggacaacggagttggagcacaagcgcaaggcacgctcatgacgctgtcagagcacgagtcgcggtcgtccttcgaatatcacggcttggtagtcagtcgttgacataccgttgcgcctccgaatccctagacacaagcctcattcatacctaggtcgccagggacaatttgatacacctcactggtcagggcgacgtaacacagtgcatcctcgccggattttgtcgtgtcgcacacgaaggatctgaccatgcctccacctcggacaaggtaatatcatgtcctcgtgaaccattcggtaaatatcatcccctacacccaccgatcgatcgaccccaagataaagttcgtcatccgaatcaacagacatccgaagtaaagaccatagctacacgagcgtcttcgaattaccctgcgccgcacgtcgaacccaagtcgttcgtctcgaggaagacgtcgaaggtgatgcgtctccctgagaacggccgtgcatagactactctaatatagtgagggatagtcgtcccagcgtttcaaatcaaaatgagaatgacgcaccgggggatctgggtgttatcaaggtcggcgggcgataggcgtcaacctccgcattcgagccgccctagtcccgctcctggttgcatgcagagggaattgcatgttccagccctcaagctcaagtgccttgacgagcttcaactcggcgtcatcgatggtgatcgcccgtgtctgagctgaaagatggcacgggcgcttgtgtttcgagtggaatactagggtcgcgccacactgtcagtttcaaccgggaaacatgcatgctgatccattatcgatcgcgaccccccgactgacgacaagctggtagctgaaaccatcatgtctggcaccaccgctctgaatcatcagttccgcaattccccgttgctgatccccacctcgaacgctttccaagtggtccgacccttgtattttcccgccgccactgtcgccactgctcgaggtcgaaagtgatgagtcatcaaaattcaaacgacatctagttcagaagtttagttgaatcacaatcaactcctcgggataccagtactgaccctcacacaaagcagcctagtgtgacgatcatgcctgccacacgtagttcatccagggtcaccgcctcgacgtcgttgttccccgtcaagaaaccattgccggcgacctctcccgccaagaaacgcacgatcacccagcacgcctctcaacctgcccccaaacgactcaaggtcgtcaacgatgcaccgcccatcaagaccttgccagtgttcagcatgaaaccggcccatctcgatccgaaccgagtcatccccgccaacctgacgttcgatttccaacaagccaaggaacatctcacggccgtcgattcgaggttcgccaaggtgttcgagacgcttccttgccgtcctttcgaaaaccttgaaccggttgaccccttcaggcgagtctgggccacgattccagatgctcagctgcaaatctccggacggaagctgacccaattgacatcgcactcagatccctatgcacctcgattgtcggacaacaagtctcctggctagccgcccgggcgatcaatcacaagtttcgtagactgttcgacccggccctcccggaaaaggccggatcggactcgggaaacattgaagggtcagtccagagctcgagtgggtgccaacaccccgcctaactcgtcctgctgacccgactgacacctacgcatggatggcgatagggacaaggaatcgttccccagccccgaagacgtcttgaagctcgatgtctcgcaactccgatcagcgggtctcagtggtcggaaagccgagtacggtgagtctttcgtcatctccctgtctcgtggacgagctgaacctgaccgatcggctcgttcggaaacgacgactctgacctcgatctcgcgatcgaccgatagtcttgagcctggcagagcatttcacgagcggaaagttgtccagcaagttcctcgccgaggcgtcagtagaacaagtctccaaggccctgatagatgttagagggatcgggcaggtgagccctatccgccctcactcttgaatcgctcaagttcgacctgatgagacggtccctatcggcggtgttagtggacggtcgacatgttcctcatgttcaccttgagacgccctgatatcctcccagtgggtgacctgggcgtccaaaagggactgttaaaatgggtcctcgcggcgtacgaacatgatctacctacaccgtcatcagacgtcggacgagcagaggaagcgcagatcgattcgtccgtcttgccagtggacacgccggtacccgtccccgcgcccgtcgacgtcgtctcgtcaccggccacagcatccaagcagaagaaacaggaacaaaaggcgctcgaaaaggcactcctcgggttcgataccccaccggatggtctcgagaccatgttcccgttaccagaggggatggacgtcaagctcatgcgatcgagattgagcgggaaaaaggccaagtgagtcggaacgagtcgtcaaggtcgaagctgaccgctgacaatgtggtcggcgagcatcgtagaggcaacgtctacctgacaccgagtgagatggaggtcatgacccagaggtgggcaccgtgtcgatcgttgggcgtgtattacatgtgggccgtggccgaagagactggttgagacagttagtgctggggcctcgacaacgttgtacggcgcaaatatagccaatgtacgagaaaagaagacgttttgtgtgtttgacctctcacttcgcaagtatcccacaagacatgcctacgcgttcggcgaatcgtcgtaaaatgataaatcggcacaaaaaccccagtcagacacacgccacactgattgcttctcggtcgtcgtaaaaaaagagcagaagggatggacaggaccatgccatcgccgcctccggcagcgtctcgcccgcgtttgatcaatccatccttcccttgaggtgacgagtgatgatcttgtccttggtgctgtgacgacaagtaggtcaggacattgtgcgagtgaaacggtgaccacgggcccttctctccccgactcacatgacgtgcacgacggcaccccaacccgagatacaatcccgatcgacggcggcgagcaaagtctgcgaaatggtctcgaacaggtcttccggttcctgccgagtcgaggttggggcatgtacgaccggtcagtcgggcatcatcctcggcgcctcttgacgacacacggcgtgctcacgagatcaggctcccacaacccctcggccacaccgtacaacttgtcggtcgccgtacccgccacgacaaagtccttgggcgtcgtaatacatccgatactatcgcatatgcacctgcgttagcaactaccagcagcagcgacgacgacgatgacgctcacgtgtccatgttgcagatgaaaggtttcgggtccggatcgatggctgaagccgcggggattccggcaatgacgggttcgataaagtaaggcccgaacctgcgttccgtcgagcgagatcacaagtcgatcagcccccgtgttcccgtgaccaccaccaccaccatcccccggtcacacgctcgagacttgcctcttttcgtacaacgtgctactgagcaagtgagcaaacgtcttgggcgtgatctctcgttcctccttcatgcggtacatgttgacccggaatcgcaagtgttcacgcagggtgtaggtatcggtcgcgaacccgggaagaccaacgtagagttggttgttgatggggaagacctgcgggggtgaggcgtcgtcagtcagggcgtgttcaacgtcgtgcgttcaagcagaaccgcgaggaaaacaagagccggtcgtgaacgtgggcatgagggtccagagctggatgtcgtcgtccgtcgtcgtcgtcgaacgctagagccggggtcgaagatcgttgaccagccgatcacgcgggccggacaaggtctttctctcgaggcaagattgtcgctctcgggaccgatctcttccacctccctcaacccccaccgacccgccctgtaccggactcccgaaacccaacgtatcaagctctctcccagctcgacgcgtgtaccgaggtcgaatatcagatccctgcccatcctcgtgctcaaccgcgtgatctggaccccccttttgccctcccggaccccgaggtgatcatagtcgtgagatcggacctcgtcggacggataaagggatgtcccaccccggtggacgtcgagggaggacgtgggcgggccgtgcaggcacgtcgacgagcaacgagcggcgagcttgttgggggtgatgacaatgacgatgctgggacaaggatgtggtataggacgaggacaggttgaggttgaccatcggtagctgatcatcttgaggacccgcgatcccagactcccaaccccgacctagactcccgacacccagactcgacacggaccaccgaccaccgaccaccgaccacagacgctcgatcgaccgacccgggactgaccttttcgaaatccgcagtcaacccaacagcctgctgaccgagcctcaaatcgctagcgatggccacgcagttcttgcccgtcatggcgatcacggaaccaccgttcatctccatcggggagcccatcgttccgggaggggatgcttaaagtcgggaaaaggggggcgaggcgtgtggggaagctgggcggagagtggtactgagtgtctagtctagtctagtgtgagaaatggtgtgggatttgcggtcagttgtggtgagaatcatcgatggacattgaacgtatcatcaaccctgtatcgacctacgacctacgaccctgcgagtggtaccccgtcattgagctgacgaagcgtgatagaaagggaagagagggaggggatacgcggacatggtcatgttcttgtggcgacggacattgaggtgttttacacattacgtcagacgacgtaagcggacatccggcaccgtcaaccaggtgatgtccgtgttacgcccaccgaaccgccattgttgactttatcagcgttcgacccgagcaagtcttgttacctcttgacatcatgacatgccagggtacacgccgtcgtgttcacaacaacggtgacgagcagcacgaggacttgatagggtcacgggctggtcgaccccgaggtgactcggtggatatacctttgaacgtcgttcctcgtccgtgaatcgccgggaagaagaagaacaggttttgaacctgaatgatccgcgtcggtcgtcgtcgttgcccagccgtagacaccttgcttgctacccgcgcccctgtatcgcatatcaaagggtgtctctctctctctctctctctctctctctaaaaccacgtcttctgctcgctacgtgctcttcttctgaccggatcatcgtcaaaggtgttgttgtgtctgtttctgaccggatcgtcggttgagcccatctctccttgcctgtgcttcttgtacgcgcgcgatccagaaatttctgaaaaaaggaaaagtttgcttcgggcttcgcatagacgacgacgacaacgttgacgacgacgatgatgatgatgaccatatccactctctcgataacccgtcctttggctgttcacttcaacgacgtcgacgacgacgacgtctatcagccgactctctcccctatatagtctctctaatcaatctctaatcctctgctcgataacccacgccgcccccacaccatgagaccccacttttcccgattaattccttgtcctcctcctcggtggctccgagttgaatctcgggttcacgcgcgagaggagacgacgagtcgaggaaatttcaggtcgacaaggtcggggtcgagctcgggttcgtacaggatgatcacgaccacgacgacgaacaacatcaaccacgtcaaccgcaccagcgccagcaccagcctcaacagtagtagtagtaacgcaccatctgcctctgcgcctatcaaacgccttaccatccgaccccagctcgatcacccacgaagagcgttttcggacaaagtcacgtttcaaagccccttttaccagttgacgcattgcgatcattgttaccccgcgacgtcgacggggcaagaaggattcgatcagacgaagcagtctcaattactcgcactcggcaagaagacgccgacgcgggtgaggtcgaactcgacgaatacgctggagacgacgtcgaccaatttggtacacgcacatcagctgcatcaacaccaacaccatccgcattcttacaacatgtccacgacctcttctgcacctgcacctgcccccgcatcggcgtcgacctcgacgacgacgacgacaaagaaacctcctaccccaggtcaaggtatcctcgtcccagcttccaaagtccacacggccgtaaagaccgaactactaaacaccctctctcaacccgagtttaccgagaccgactccaactcggggtccaactccaattcggcgtccggggctgaggggaagggaaagggtagggtacctaagttggttgggattttggccacggataaagaggacgcggcgagttatgcagaggtgagttggctagttccgggtcggttggggggtcacgtcgttcgtccgctgattcatatcccatcccactctaccatttcttcctcgcacgtcgatgcacacatacgccacgcccgtagttcacacgcaaatcgtgcacctcgctagggatcacgtatgaactccgactcgtcggttcggcaaggaaagatcagggcgatcaaccgggcgtagagatcggcgtggaagaggccatcctggaggccaatgaggaggaaggcgtggatggtatcatggtcagtaccgcagacgttcgtcgcaaagtgttggggtgaaactcgggctgacccgaattggtcgtgcgggttaccaggtctattacccgattcatggcggttcgcgagaccaatacttgcagcagtgcgtctccccactcaaggacgtcgaggggttgcatcaccagttcttgttcaacttgtaccacaagtgagtccgccatcgtcgcgacgaccgaccctctcgctgatcggccccttgcgaccccgcagcattcgacacatctcgccctcgacgctccgacccatcccggcttcgcacttgcccacgtcgaccgtcaacaccaacgctacggaagaccccgccccgcccgggacggtcaaatcgatcttgccctgcacaccgctcgccatcgtcaaggtgctcgaattcgtaggcgtctacaacaagctcctcgaatggggtgatcgagcgaggggaaaagtcatcaccgtcatcaacaggagcgaagtcgtcgggagacccctcgcggcgttgttggccaacgatggcgccagggtgttgagcgtggatatcgattgtgagtcgggtcgccggttcgttccaactagaatccgacggggactgacgcccgacgcccgacgccatcgccgcagccatcgtcgagttttcgaaacgaccctcgacctccgaatcccacacgtccaggtacaaccctcatcacatcatgagccccctcgccccagagttcaccctccaggacgctctcgccgtcagcgacgtcgtcatctcggccgtcccccacaaggattacaaggtcaagaccgagtggttgaaggacggatgcatctgtgtcaacgtcgccggggacaagaatttcgaagccgacgtcagggacaaggtgggtcgcccccgtcgagcgtgatgttctttcgctctggctgacacgtacccctcactcgctcgcacgcccacccttacacaggcatcgatttacgtcccttcagtcgggcaaatgaccatcgccatgctccagcgaaatttgttgcgtttgcgcaagtataggaatctgatggacaagcaggaagaatcgccgttctaggcggcgcgggggcaggcgaggtcaaaagacgaataaagacgggtccgatcgaaaacacgtatcatagggtctgcgcgggttctttttgtcttgtcaacgatatagaagtgtggccagactgaatcgcacgatcgggtctctcgcggttcgcacgtcgagtgaacagggttcaagacagactgcgccggccccctgtggggaggtcatcgaaggttgggaggtctcttgactcgcccttggcggtactctgcgaaagcccattcttgcacagcagaactgtctcaagttgaagggccgctatctatgccatatgaagggcttgagagaatcaagggagatgcgaatcggattatacgaggggtccgaccttcctttcaagggtcccttgacgagcaagggagacaaccaatacgccggctcgaagggccaggagatagaacgacgatgcaatcctaatttcggcgttcaggacgaagaatttgaagacaacggttctcatgaatctgagagcaattgaattgaacaggactgacttcgccggcacacgcctagtcaagagccaaagggatcctgaacttccgtccgagaggtacatcagagtagaggacaccgcgtctgaaagagtgccgcggcatacgcaacggaagtgcataggcggtcgagatcctgctggtggactgaccgagggcacggggtcggagtggtctcgagattgcaggaagatgaatgtactccgcactcattccatgccgcactcgccgaacatgcggatctccgagatgttcctccctgcagagccgagacgatgttgcacaaacgttcgatccatgatgtacccttcgagcgccttggttacaacaaccccggaaggcatacccacctacccccacgtctcccactctcgatccaccgttgaccgaacttttgctcgtaccacctctgcccgttgatcgccctcgggatcatggacgtgaggagtgcgacgaggaacatccagggtggagtcaacatcgtgccggacgacgggaagggaagtcgggcgagttgctcaatgagaccaagtgtcggacccgagtattgggagcgggcttggataagaaggagcgaggtcggtggggtttggagcaagggattgggcgaggtgagcagggcgtagcacgtccactcgaacctatgtatgtagtaatgatcaacatcggatgggaccgactgaacgtaagccgtgtgacgacgtaccactcgcacaggtaattgggaaaggtcacccagtggaacaagccaccgacggggatctcgtaggtcttgtcaccgtcctgctcgttcccacctttggtcagcgtgcgatccgggtctgaaaaggtcctagggcgcaaaaaggggaaggccgtaaagattaaagatcgaccccgaagcgagtgaaggatctcgtcgtggtagactatacgacacgtagaatgagctcgagtcgatcggcacctcgagacattgctagcgactgaccgtttcctgccaacccggcggcccagccgatcgataacaacaggaacgaccaccctcgatgcgcaccctccgcgacaggatccgaggcaatgaacgagcccaccatgtacccgttcatcaggttgaaaaagatggcggcgagcgtcacgctcaggtgttgtggtgcgcgagggggagcgaggaggagaggggaaatgagggagcggatcgagtagtgaaagaggtacatcgactgagggtgacgttggggattcagcccggatcaatatggggggcatttcggggcgtcgatactcaccatgacgatcttgctccctgttgaaagcgtcgacatgttcgagttgagcacgatcatcgtcaagaacgtcaatggctgccgtgttccccacaaaatcagatccgaaccttcgccaacatccaatttgttgcttgctcaccgatacgatttccatggcagcccacgctcggttcccatccaagtacaacctgcgcttaccgccctgcgaggcgaacctgccccatgatccgttgacgacgaatagggtcgcgggagaatggagcggaaagtagtggtacagtttgaggagcgagtggaaaagcggcgtaaaagtcgaggtcatgaaggccgatgcgagtcgagactagaggatgagatgatcggtggcactcggacgagcaggagaggtaggagcacatcgtttgtctcgagcttgtcctttgaatatgttgattgttgaagctttctctcgatcgatccttcggtagattgatgacgtgatacgagattgtcagcgacatccaccacctttcaagtagaaactcggtgatgacggacgacgccggctgacgatatgcgatgattccatggcatttcaagcagatacactcaacatctgcagagggatgacaatttgagcgtctgggaaatcactatacaagctatacacaccatcatctctgatctctgtgttgtataacaccgacccggtggaacgccctcatccgcgcttgcgcgaggaccaatggacccgacgagtttcgttgaacgtcacgtctttcgatcgccgtcatccatagaactaccgtttcagcgttcgagtttgaccgagacgggaacaagcaaagtcggagagtataattccttgcgaaatcatcatctcttcgctatcaacgagtggtgtgaagggagacaaaatgtttcaatctgacaatttccgtaaattgacacgtcagtcttgaaggaaacgacctgaatttatttgataacgcccccgtgaaccatcactcacctgctagtcaaacgggggcgaaccatgaccaaccacatgtcgagcatatgttaaggatgggtagtttgggcagtctcatccatatcatctctaatcaacctagccaaaagacccctgcgtagaaacatgtcaatctcaccgcataccgctgcgatgctcgccacacgcatctcgctcacccgatcgacacacgcctcgatcaggttgttgtcgacttatccgcgattccgagcgtcatccctgtccagatcgtcacactctgccacggcgacccggttgactaccccggatgtcccattggtcatccccacagcaggatcaagagtgaccaacgaccgaccagagaacccttgtttgaaccacccggtcgacgagacgggcaaagcgaaggagccgcaggtcggcgcagagagtttcgggatggccgatgcctggggtctcggtaggggcagcagcaagaacaagagtaaagccaagcaggagggagaggcaaacgggctgagtgacgaggcgttgaaccggatggccatggagaagatgaacggcgggtcgtcatcgacgtccgcgtcggctgaagctacgtcaacaccagcgaccccgaccccgacgaacgattcgaacaccaactcgtacgtcgagatcgaacaggaatccatcccgcgatcaagccgtccacccgtcgctccgagttcttcgtcctcgtcctcgtcctcctccacaacgactggcacaccagcgaggaaagccggtaggacgatcggtctcaagggaaagaagaacgctatcaccctcgtaagcacggtgctcctcgaaggtttgatcctcgaatgaccctgagctgataccccgccctcacgtgcgtgcatagaccccttcggccatctcacgcctgagcgaactcgccgacccggtctcgtccacctcgacctcgacatcaacgtcgacatcgacagaagaggctaaaccccaactcctccgcatctctgtccgtaaccgtggctgcgccggactcgcctaccacctttcctacttgcccaccgacgccaagagcaaattcgacgagatcgtcgaacaggacggggtacgcgtcttgatcgattcccgagcattgttcagcgtcgtaggcagcgagatggattgggtggaagatcggatgagcgcgaggttcgtctttaaaaagtgagcagatagagtcagatagagcatgggtgttccgtacccgtccggcaagacacgacacgggcaagctgacaagcacgtgatgacccgtcgcagcccgaacgtcaaggatgcttgtgggtgtggagagtcgttccatgtctagccgtcacgctacaccgcgatcttatgggagccgagaaacagaggttgtatcgccgcgcgacgattagatgtgcacacgaacactttcgagcaagctgctctcgggacatcaggtccgaactcagagagcgaaagtttgagagcctagtctaggtttataacaggtcataccgagccttagcgtgcaatccgacccctcgccatgaacacgccacgtccgtccatccgactgtaaccctgttacggcttggaaacttggcctctacttgcttacgagatcttccttgaacgtcgtgaagatgacctgccagcccttcttcatcgcttctggctttgctgcaaagcccagcgctaactacgctggcccgatttcgtggcccagcgaagcggtccgtcatgggtacgggtgacggtaaaatgcgatgcgtgtggcatctagtgcggcatatacgattcgtcattgaatgtgtcgccgtgttggcagggaggcctttgacctttacagcatgggctttgacagagtcctaatgtacacccagcttcgctatggtctttggtcgagataaagatcgggctgtaccataacccctccggagttgtcgtcgtcgcgatcgagcccaagtactggcaggggcaaaggccatcccaaactcgtgattgttgaaccggaggcaagtctctctcgatgaagaggtcatgggaatgaagcttctacgaccagcatccgggtcagccggtggtagcctatcgctttgtcattgccaaggggtagctgtgcagacgatcgccgtgcacgtcgtctgtcggtcaggaggattccggtgatgtcgataccttgctatcggcgtctcggtggatcgagacctggcctcggggttaccgtcgtgagttgccggtatgatgttctccacgaataccgggccatgccaggctccgtaagatacccctttagactagtcatgtatgggtttgagccgacctggtctcgggatctcccgtcgcgcccttcacgcccgtctcttgtcatcctccgccttgacctgctcgacgtatcgccgcacgtacttgcggctgacgctcagtttccaccctcgtcgccatctagcttccctgatcgtgtccacagcggatcgtccgtcgtcaccgcgactccagtctcgccagagccgggtgacgtgaccgcacgccgtccacatgtcgtcgtaatcggcgtcaaagaggagccaccacgagtcgggcaaggggatgatcaaaaggcgagtagcgaggaggatcgagaagcacgcgatggtcgtcggtgggtagtgggcgtagacgggagtttgaaggctacgagtcgcgatccgtaatctgggtatcaattcgaatcggatcctggtgatcgggactcacgcatcgttaagaatactccaacagagttgtacggcaccgggcttgttgacgaggtccaagatcttgcagtagttgatcatgtgactgtaaggcaggtcgacctggtttccgaagcaaacagtcagcgatcgagtgagcgaggcaagcgtgaggtcgctacttgcctgaacgtgaaagcctagccgcttcaagatttgcatttcggcaaccaccacgacatctttcagttcgtagtagatgccactgtgaaagctcggcgggttgtaggcgaatccgaccaatggatcaggctgagcgagctgatcggtcgaaaggttttgtaggtgctcgttccgggccgtgtagagcaggtagacgttgaggaggtcccgaagacggacttgactctcggtaagcttggacgagagatatagagatccgatagcaacttcctgaggccggacgatcgtcagatgacactcgcgaccgtctccaaagccgcagtgaagctcacattgaccgtgtacgacgacaagctgctgacgtagaaaaatcgttgtagcagcacctgagccgttgccagcgtactctgcggactatcaccgaatgagggctcgtcagaagcagacacgtgcgacaacgactgggatcgaaagacttgcagttcgagcaatatgcctagctcctggatgagcacgcatcctaccactcgaagatcgtcttctaggtcctccggaacgccgtcttgacgagaaggggtgaccagcacctgctggaggctagccagtggctggggcggatgcggcatcgtctacgattcgaggatatgacaccagttcaaggcggcagtcggtgagatcataaaggcgtgtcagataggttactcgaccttgaccggccgcccgtgccgagccaagttgttgctggtcgacgcgcgaaaccttactcgtctttcgccgaagagacttgcgcgcctagttgcctaaccattcgcagtgtcgccagatcagacgcaatcgtcggtttgagtattttcgaagtttctagtgagatcaaggtggctgcttttagcctagccgcaatcgcttgctttctgggcttgttcggacagcgaccccgtcacaaaatcgggctcggatcgcgtcccagcgacttaggcaatttcaagacttcgccgccgagacgagtctcacaagacgtcgttcaaggtttgcctcgttgggctgggtctttcccgacctgtagctgaggagagacctgagagctggcttgatcttggtgcgatcacacctcgtaaaggcccaaagtcgatcgccgaaagactttctcgtgattgttacaagccgatttgtacgaacgagctcggcggaaacatcaccttcgcgatgttggcgcatacgggaatagtgttgacgttggtggcgctgaggatataacgtttcctgctgggggctacggtgactaggcaatcgtcatctattgaccgcttcatgtctgggcccggcgctttcagatcccgcccgccgacgtcacacttccaacttgaaacgccggggttctccagaccctacacaatctcactcggtctctgcggagacaagcagtattttccagtctgagcgctgacctgatctgcgcgtgagacgttgcacgaagcagcccatttcgccgggtcgatgtcaggctcctgggggcgcccatgctcagtctccagcagctgttcgtctggatggcgatctgagtcgtcctgcacccacgcgttcaccttctcctcatcgccctcggccccgcggtcttgtcgcttcggcagcgctacaaatgacaccgtgtctgcgatcgctgtggagtaactcgctgcgccctggtgctacaaactttcggatatcctcgccgccctaccgcaacaaacgccattttgtgggcgtggaaatacaagcgcagccagcggaattgtcgtccaccacatgcgatctagttggtctctgtcggtgaattcaagagcccaattctcctctgcgcaaacccgacatgtcgaaaaaaatgtaaggatgactttttatttgcaagaaaaaacacgaagacagacaagaagcggctacaatcaagccggctattaagcccctttccaacatcataatatacaattggtgcatgcggcgaattaatctattatcggaatactcgaaggagccagaggattacttgacaatgactctttcgtccgcaggcggatcttttacaaatgagactccgagtctcaccccctttccccagatctacaatcaccacacgcgaaggacaagccctttgctccgattggatacgacaaggaaggcttgtgaattacgttcaagtatctgtcaactctggcggcagcttggtctcgaagatggtgcacgtctttgttcgtcggtgatggttgttatgtgcccgtataaacttgttcttggcactgttactcagccgtccaatgactggaatccttctactgaatactcgctttctgacacgctattcctcgaattgtttgcgtgaggtcagatccgtccacctcagcgaatgggtttgctcgtcacgaaagtccccgttgtttgatagtctccctatgcgtgagtaaaagtgaagcacgtcgggcagtcatatggagcctcttccgttctgcgctaggctggcttgagagtcagcaccctcctctgcctccggtagagatcctccatctactgtatggtatgctcgtccatattaacgatcaagtcatcccaatatacttctatgcccagcgcaatttttgtgcttctcaaatcacacagactgtgatgacccggtctcttgcaaatacgatgaccataaccatagctgtcgaggctttagcacagtagaacgatggtatgactgcgaatgactagcctgagtatttatgaatatccgtcaggtagaatcggctgaaaaaaagtagacgtgcatattgcatctggatacctgcgagggacatcgaattgatgcagctggacgatcccgtggacccggctggactcaggctcgctgacgacgaaagagaagcgcggttgcgggtgatgtgactgaatcgggtgagtttcttttctttcgataggatacgatgctagcacaaagtgaatacgcagcaggtcgaggcaacgacaggatttgttagggcacggtctcgtgatctccggaggtgcaatcgctcagaagtacgcatctatattatgactaatctaggaaaatctattctgctggtacaaaacgggacatctgcctgatcttctctcccttgtagtaaaagatgaacgagaagggaatcatggcgatggcaacacagcccagcaaggtacctacgacccgaggatgtcagcttccgttacattagttaagcgaggccatttcacatcgactcacatgcccattgcggccgcatatgaatgaacattggacgggcagccattaccgcgcctatgagtgcagcacaaggtaagacgaggcacgcagggtggccataacgtccagtctaatactcacctccggcaaagcaatatcgaaccatcacattcgcggcaatggcgctgcttgcgtgattgtgatacgtgtcgatgagcatttgataagtcgagataaagatgactgcgtgaacaacagctcagcatatcggacgacgagctttaaccctggaagaacaggcttttctcacagactgtgctgaatcctactccgagtccgctcgggagagacgcccagatgctgactgcaatcgtttcgacaatgtcagtcccgaccgcacgtccctttagcggaacaaggtcgagaacccacctgaagcgtatccaccagcccaaccttgccaaaacagcgagattggtaggatgaaacccccgatgatgagtgggattaaccgtctctctggcggcggtgtttctccacgcttggcttctttcgcatatgcccaagccagaggcatcgccccgagcgtcgctagtccagcaccaaggaggatcgggatgaaacacagaccgacttgatacaattcaaggccgtgtacgtcgccgtagataacgggcaaggcttcaagaaagccgaaaaagacaaagtaggcgaggctgagcagtgatgtgaggtagatgattacgggttcgtggaccagcatagtaagcgctttcagcaagacgatcctggggcgacgagaggtgattagatcggtgacttgcagcggtaacacaatgtgacggacggcttactgtaagaacttgataaaaggcgtctttttccgcatcggttttcgaatagggggaccgacaaacgattcgcgctgggatcgtttccataaacgtttggccttttcaaagaggatgatgtcgaccaacgtctcggggcaaaatgcgctcaatcccagggagagcacgccgcccacaatcccgcaaaggtagtaattccagcgccagtcccagaactgggaaattgccgtgccaatgacaggagcagccatagggccgaggaatcctgccccagcatacactggaaaagcgtagcctcgctcgacgtgattgtacatgtcattcagcgatcctccagcaacagccagaacagcggcttttctcgtcatcgcgggtgaaccgatcagccatcaggtcaatggcatggtaagagaaaccacgcttacctcctgtggctccggcaaagaagcggcagaccagaacttgagcccaggtttgagccgcacctgtgccaatggtaaaagctgacgacaccagtaaagtgaccagatagattggttgtctaccgaaggattccgagagaggcgccacgggaagagcgccaaaagcgaacttatcggaacaattcagtcgaggattcgcatggccacaatgaccgctggactcacgccgaacaagaagatggccgtcgacagttgaacgacctcgagactctgaccgaattcgactgccatcgcctcggtggtcgcgctcgatatggcagagacgtaggtgatgagcacggcaacgagagtgacattccccaacacaaaggccttgtacacggatgaccaagtcttcgggttggctgagaggcatcacggttcacggtttggtcagctccgggtcagccgtgttcctagacagcgaccccgactcacctcctggagtaccgtcaagggaaacgaccaccagttcatcgtcttccagtttcaagccgagatcatcccaagattcggtcgattccgccttgctaatctctagaggcgagacactgtccagtcgccgccattggcgaagaggagcagaccccaggccgagcagcgatttcccgatggacattttgcagaatccgtgtcgaggtgggtcgatacgagtgcgcgccgactgtcgcctcgacccgaatgttaggtcaagtcgatcctgggatataagaacatcttgatgaattgctggtgggagtaagggggtcgtaacgctttcatctcgagcatatgcatcccgattaccctcggctagactcgctcgggctatttatttttggtaaccttccgcaagcgagcaatgccgggcggacacctccggccgagcgacaggcatcagataagatatttagttggtaagtgatgcacaacatgaattccatgtgcacctccacctctcgagaacggtaggtgatgcgtctctcatcagctctcacattcaccactttgaatcgtcatatcggcaaagcatcaacacgttcttactatggactcctgtctcactcgcccctcgatagaaagagaccaattgcctgagctcttgatatgggtcatgataccggaactcaaggtatttttgaggcagcttacgaaccagcaggtggtgattgccgtggctcaacgggtgcaggagacgatcatgcgggatctagtcttcagtaccgactcgaattgcggatcatgcctggcctcggccgtagcagcgatcacgcacgacgagaagcgtcggtgaatcatgcataaatatggctagacttgcggtagctatgaccgtcgccgagtaacaaccgaatccttgctgcccagggggtaaagctcgggaggacctctcaatcaaagtgggatcttccgatcctagcagttcgaggcgaggttgtcatcaaatgtcgaccgatccgaccgactttgctcgggcgtatttcgtcaacatcacgtcatcgccgtcgatcgtttcggtcgatcgctcaatcgggtcgaacccccaggttacgtcggatatatatgccaaacactgccaaggacttggcgggccggtccagacatcgcacaacgacccaagattcaccacggccaccacatcatcactcgctactcgccacgaaatgaagaacgttgtagcctccctcgctctggcgctgataaccggtctgtccggatcaaacgccaacaacaacaatgctactgccacgacgaccccttcgatcgggtatggtaacatcacttccactttggcggacaattcgaccttttcctttggcgaccgatacgctgtcctgaacctcgatctcatcaacgggatcgtcgggtcgatcaatggtacccagcagggtcagacctggatcaacagcacgctcgactgggtagacgcggtgcgagcaaaggagtcgaacccgttgacgatctggaccaggatctactttagcaacagccagcgacccgagttgggcctcggtgtcccgttttctaacatcgcaggaggattcggaaacatcacggagcaatccgagacgggacaactgtactcggctttcacgcctctggaaacggacgtcgtcttgccgaagaccaggttctacgccggtaagtgaggggtctttctgcggtgggtaacatgtgactcacgaattgcaaccttgacgaaccttgcaggtgctggtaacgcactcgaggagatcctgagcgcgtacaagatcgataccgtcgtcctggtaagtccatattgagagatttccttcaagtatcctgattagcaacatgtctaatgcgacacttgctacagagcggagtccgtacctcgggtgtcattctgaccaccgccattcgccttttcgatctcgattacaacgtctacgtcatctcggacaatgtcatcgagaccccgcccgataacgggatccacgagacgatcttgcagaacatcttgcccaagttcaccggcaccaacatcatttctctgcaacaagccaaggaggctctcgcaaggagtgggtaaaggcaggcttcaattagagtataaggatacgtgttgtcatacatgaattataggtgtgcggaacgtccaatggacaggcaaaaaatcaaatcttgtatcgctgcagcgccgccttgcctatcgtaataagggtcttgttctccactgccctgccttggtacggggcgttctcatccttatcgataccctcagccccgatgctcacgatggcggctgccaagacgtctctcgagatggagaagccgaccatgttcaagacggccaataagcagactgaatcaaagacaccgccgggtcggacgacgatcgaagggacgagggggttgtcgaacgtgtcagtgaggaccttgacctcggtctggccctgcaaagtggtcgtacatcagccgatccgatgtcacatatagacgctccggtttgactcgcccgaacttttctcgcctggtcgaggaaccacagtttcttgtcctggtccttctctaccaaggctccgctgagacagacaaacttgaaagctcgttgttcagactcggatgagacgctgacaaaggcgtccagaatggccttggggtaggtaaaggcgagaagatgggcaatctcgggggtagggggaagcgccaatccgaggcacctgaatcacgttcgagaagcaggtcggcgaggatcggcgaggtttcggacaacggagactcaccagagacatgcttcggctcccttccagctggcgatcgtctcgtcgtcaaactttgcaaagtcttgcacgatgcaaactttcaccttggattcgttatcatagagaggcagaggcttgcgactcaaagctacgacggaggtgatcctgggatcctggagacagcgagccaagacggctgagccgatgtaacctgtgacgcctgcagagtccacgagttgtcaggcatagcaccggtcgatacaggtcggtctgactagtctgacctgtgacgatgaccttcatttgagagtgtgcgtggtggagttgtcgtctaaatcgaattggtttgtgatggggcttttcatttgccggaaggatcaaggcctggggagccagtcggctcctacgtagtggctgagtatcagctatttatgaaagatgatagcgtagagccgcaccggattgcgattcagtttgttcgagtactcgatagcgagttcggcgattatacgcggcttctcggctggcatgatacgtcgcaagaggtcggcatcagtctcatgctacaaacccatgcctttaagccacgacattgcttggcatctatctatacaccgtcacgatctgcctgcaggtgcgggccgctttgccacagaagcgatgctacatctcgctgttatcgacaaggagcgcactaatgtttgtaaacgaatatacaagaagaaacgcgtctttgcaggtcgagctgggcggaaggtcttcagcgaagtaccgggcttgcggtgcgcgatcgacttgcacacgccgtcgtgaacgaggtataggtctttcgaatgcgtttctagcctgatcattgcctgcaggatcctgagcgggacgtttgcctatcttagcaaggaccgctggactactgctttttgcgatggtggacggcccccggtcccaagccttggtaccatatgacgctgacgggacgttcccggggccgatcgaggggaagtcccggcgaccttgacaagtgccaccgagtctgacgattggttttcctgagtagtcggcattgcgatgcgacgatggatcacgcagacatgtcgcggacaagcagtctgagactgatgcaaagtggtctgaatacaatcagctcggtggtctaagcgatgcacgagacagaggaatcggctcacagcccaggtcggatccatagggtagcgttcctgcctgcttcatcgcttgacacgcagtcgacgtttagtcactgtttgtatctcagcccaaacttggcatgattgaccctggacgtcttttgtttcgactggtagccgacaaacttgacgacctcaggactctccaggagtcgagccacagtgaacagctcctgggcgagatgcctattatcggccactcgatgcacagccgagtggcagggtcgacagaggtatgcgatatgggtagtcaacagggattgcttgtcaacgccgatgtccacgggaggatgagcgaggacgtaggcatgctcggatcggggaaaaaggtgatgagttgttaagaaagccgaccgatcgcaaagttcgcaggtatcaggtcgaggaggaggtcggagatgccgcgggtcggtcgagtctgacgatgatgttgcggtgacatgccagtatgcatcaaggatatcccggctgataaaggtcgtttcttgaggatccttttcgagcaaaaacacgaggtgttcttccaagagcgattggagggtgtcgtccagatcatgagatgattccgatgctcgttctgcgctgcttcccgaatcgtcgttggtctcgggatgaaatccgctcatgacgatctgtgtggcgaggaattcgaccaattcatcgtccgtgcgaggcagagcgatgttgatcgccgcagtccagcggtccagcgagtcggcctccgatgaacgagtcatcttgatctgcgtccgattcgacagcgatctccgccactcggtccgatggcaacatcaagggatagatggaggttcgagtggatgcgagaccaatcttgattctgatgacccaggctccggaggtcgctggatctgcccccgttacttacgtattcgagccatgcacggccgccgaaactttattgctaaacaactccgtatactcggtaccgggttagcaatcacggctgctactgcatggcgtgatctggtgaagtttgttacctatgcctatggcagggctttcatacagtcagataagatgacaactggtcttgcatcacacagccgccgcaaccgcttgataatatgcgaggctcggtgatcgtcggcttggcagtaaccgtcatgtaccatctcgtcatggatcatcgatctattctctctgtttgatgaagaacgggaaaggatataaggattgattgagcgggtctcttggctaccagctctagtgcgcctcaaggtagctgtccaataaaatttccaccacggattccatcttatcgcaacgcaaaacactcaaacgctcgcaacatgtctcaagtcatcgcagttgcaggaggatccggtcagcttggacgcgccatcgtggaagccatcaaggcggatggcaagtttgaggtcatcgtcctcggtagaaaagtgagagttgggtcttcaacagaaatccggcgtgcgtgctcaatccgtttgtgcttgcagtcagctgaagcatcggaaggcaaggccaggatcgtgggggtcgaatataccgatgtcccgtctcttgtgcaagccctcgaagacaatcaattgcacacagtcatatcgaccatcaattcgataggcgatgtctcggccgaattgaacctgatcgaggcgtctgacaaggcccaggctaccaagaggtacattccagcgacatggggagtagagtataccgaagagtgagtagcgagatgatggatgtgttgccagcgctagcgtaaaattgatcgtcgaatccgattctacagggtcgcttcctatttccctatcgctcatggaaagcgtgccgtacttgctgcactgagaacaaccagcctggagcataccaatgtcgtcaacggctactttgccgacttcttcgtgcctcaaatcccgacgtatctatccccgctggctgccttccttgacccgtcgcacgacattgcagtcattccggcgtcaggagatgttccggtcacatttacccacactttcgacattgccaagtacgtctcggcactgttgtccgcggacaagtgggaccagacgacctatatcatcggcagtaaagtcacctggaacgagctcgttggcctgttcgaagacgccaagcgtaccaaatttgagatcaagcatgattcgctgggagatctacgcacgggcaagattaccgaactcccgtcccatccggcgttgtacccctgctttccaaaggaggcgatgcagggcatgctggcggcgtttggtatcatgttcgagacgggagtgatggatctcaaaccggagcgtaccgccaacaatcaatttcccgaggtcaaggccaggagcatgcaagagcttgtcgccgctgcctaccgcaagtaggtcgagattgcggaagatcacacacgtagtaaatgtatcgatgaggcgaggtcatgccgacattgtaatacgaagcagacgaaggtcgcctacgtgaacacaaaccagtttcacaactggcgtctcgcattcttgccatttcgactgcgaggtgcatggctcgtctgtccacgatgagccagaaggccggccagtatccgttcgctcttccaagtgacatgtaccaacacgctgccttgagccatgtccgttgacaaagaccggtcgaagtgatgagcgccgagagggggttgtctcggggccgccgggcccaccacgaattggttcttatagcagacgcagcgtaacttgtcaaggcgtacagggacaaccagactgcttctttttcttctagcacacaacgggtgccaattccgtcggcgttggaactttatccagagaatcgttcacgacgttcccaccggaagcggagcttgaggtcggaagcaggttgtgactcctccgcttgacacggcaggacatgggtcgtgtattatctacacagcagctctccagtcgatgagtattgcagaccaagttctggatgatataaaacgctgggagttcaggagctcgcgcgcagggttgtcggccgggtggttctcaccatcgctcttcgtctgcgcatactcgacaatcatgggactgagagagtatcaggaaaactccgagtcgatccgcatcgcaaaccagaccgaactcccgctggtctacgtcatatctcaagtgggagttctttatcgggggatcatacagccaggagagcgagtcatccggcttaccggtcgcgtatggttcaccgttacctgttatccttatgacggcaccaacttgccgactgacaaagatgtcattctaccaatcttcatctggatcggagccgccatcgctctcgccgccacagctggtactgctgcactagcagtcgcgcctgccgtcggtacagctcaggtcatctttgcgggaacggccacggctgcttcggtcaatggagccgcggcagcgatcgcagctgtaccggccgtatactgaggggcacaagcggcacagtcggctctggcgcgcgatcttgaaaggacgctcaacgccgtcgtactaaagggtcattacgcgaatggaaattggttgcacgtcagaggcggccctcgagaaggtgttgtgcactcggcttgggaacctttgcgattcgaacgataaagccgaggcatcgtgtaggtggaacggggccgaggtgggtgtgactgagtcatgctgacctcccgtctccggtctctagttcgtttgtgcgcctgacaacattgggcgattcacatcgaatgtcaccgcaaatcccgcgacatcttgaacctagctgattggacatggtgtcgtaacgttgtgcttatataagctttgaattctgacgcgcaaagactgagccaaacgttggcgcaatcgtcattttcctcacgccctgctacctgaacgccgcattcgccgagatgtagtacggagagcagaagttggatgtgttcccagtagacgcgcacgtgagtcggtctcccgaaaacctcgctcctaggaaagaagaggacatggacgtttgggacgaaacacagtagaaagcgggacgatcctcgtggcgaggatctgacacgatgctcgactgcagcgcacagagcggtatcaatttctttgactagccaatcgcgctctttctgaacgaacatcgaaacttcgtacaacgaaagaaaaccccttgttcctcaacgaagcgattgtgaaacctggtgtatatgaatagcagccacactgacccttatcgatgcgctaaacctcagttgaaatacccttgttgttgaggaggcataggttggttgtacgggttggagtacgggtaaggtccaaagccgggactgagataattaggttgagaaggaggtgtagtcttgttgtcgacaggataaggtgacatgggtgacattggagaggggaccagttgactttgtcgttcgtgaccgagacagacgccgactgcgagtgggcgacaagatgggtcagcaggtgggtctgtatcgcaaggctggacgacaacgcggacgatcgcgaagccctactcactcttgtccttccacagtccttgtcgttgcaaaagcatgaaagccaacatctggatgatcacccacaacgttccaaagatcgccagcgaggcagcggccacgttgaagataaaggtgggtgccgtcctgattctgcgacgggaacaaatgtagttggtgacgatccgagtgggttgtttaaattcggctgcgatgggcaagctcgattcgttacttgcgagatactcttgggcctctttgagcgtgccaaagcccggagcgttcgggttgttatcgagcaaagtgtcctcgaggtccggtcggaagagctgagcctcaaaggcgtccaaattttgaaacatgttgttggcccgaacgccgccaaagtcggttctgacggccgaggtcagcatgttatggaacgtttggacgcccgatctgaacgaggcgttccagatcatcgagtcggacggaggcgttgtcgtggcgagtgtgtttcccgacgactcgaggatggtgtagtttgcatacgtgtcatgctcgacgccatacaagatgcgagagccgttgacgtccgacgcgatcgatgcgcattcgggcagatgagctcggttcatgggacaccaatcgaggtttgccacaaagccgttgagttggatcgggaagagcgctggagtcggaccatataccaaggacctcaggatgagatcctgagtgtcagcgatgcgaagggcttccgtgaggttgcgtcggaaagggacgctttcggcctcgaccacagtctgctcgtaatatgaagcatcgtcgacgatttgataatcagacacggcgatcccggtacggtagttggttctgatgatcatgggtagggggaggtcacagaatacgtcgatctgcatggacgtcagggggatgggtgagacgtcgtgcgtagaagggcgacccatcagactcacgacgacgttagtccggaagagcaacatgtccatcttgaagaacatggcgtaaatgtcgcacatgtctagcggcacgttcctgtactcgagggtgccgttaacttgtgccgtcttccagcctgtcgccaggccaactcgtcatttctggtaatgttcatgtcgcgttcgagcagcttgacgatttcccagttgaacaagtcgttggaggcggcaagtggaccatccagctaccacaaaggaaagccaaagggaagatcgatcagatgtggctcttcacggtcagtcttgcgtggttctgattcttccggaaaacacatcagcttggccttgtgacacggtccagcaagagagcgacattggctgaccttcatggtcctgtagctactagccatgatcggggaggatttcgatgggtccgacaaacgatcaagaagcggtatcgataacgataccgttagaatcattgactcgtcatcgctcgtcaacggggtcagcgtttccatacgcgagaacttgtaagcgtagtcgaccctttcttggcgttccgccttgatcaaggcagagtctacagccagtatctgaacgagttctttcgatggtttcgtacagcttcctccttgctctctggatacggacggcatcggacgaattcttcgactccccttccgggactgctgcgatccaccggctaggcgtgcagttcaagacattcgtcctgggctacggagagaacgaaaaggtcaacagggataacgctgggtactgctcggaagtcgagtttcagcggcacaagacgggaaggagcaagaaagccatgaagaagactcggattgccgtatgaagcgctctaacggcgattatctctatatattacggctgctttagtgaagagagcctggactggcaagacgctctcggtgtcgatggcgatcgattcgatcattgtagatcagagatcagatgccacaaccttttgtgagatgatttatatctttccgtgttcgcgatgatgatgcttgctagcaagctggtcagcgatgtacacgcccggagggggtatgcacctgagtgatacatggcaatcgtcgaaacgcctgatggcattaacgaagttgaccgaagagggcgacgagatatcatgttacccaagctaattccgccccctactcgtttgcataggtatacagatacctacccgcgttttcactcctcggaacgatgtattcgtaagtgtcgagcgggaccttatgggaccagtgattgtaccagaaccaatattcaaattgttcgtattactgttgctgccgtgctgatatgctctggctgcgaaatccttcgcatgtacacgccttcgtgcgggtctaatgcctaggctgaggatagacttacctggttgattcgatagaaagcatgatttaacatgatttacaaagtcaatgcacgcagtgtgattgagccagttccgaatataaacccatctcgtggagtatttgataactatacgaacaaacattattccagggctcatgtgtcacctacccgtacaccatcatgtattgcgtacctgttgaccgttcggctcctgattctgtcaactgactggatccgctcaagcaattattgcaaatgataggccgtagacggcaggcgactgggtacaggctgataatcaccgtaaaatgtaggtagatacaggtactttgcatgttgcttgatggatagtttagcttgacctgtgaagcttgtctaatcgcctgcctttgtccataatgctccacatggctcaaaatatggaatgtcgtcccaagagagcttcggatgaggctatttagccatcgatgccacaagccgtcttccagctcgtaactcatatccgtatagcggctatgcatcaccacctcggcttcagcgagcacatcaagtgtctgcttacggaaggggcagacgtcgtctcctgccaaatctgccaatatcctgctttagttgaacaccttatctctttcacaaagattcgtaccgcccaggcggaaggcttgtgtcggccaacgtgtgagtggtatgggccgttgacagtagctgcctcacctgagataccagcttttcatacaggttcatcataaaactgctccaagctcgcaaaggggacgagcgattgctggcggatgagggctagctagcgaattgaccgacgggcaaggggcggtcttttgttgagctggactttggggctcgagacgggcagccgggagtcaggagatgggtcctgcttaagatatggtgtgggaagtcacctcctgtcctgtagcctctcgcctcgtcttctcattcgctgtcgtcccttagaccaggccccggcgagtatgtgccctctcggactcgtggtgtgtccacgttcgaaaggaggagatcgaggcatctcctttggttgaagggaaggatgcgtgtactgccgcatcgtccggtgatcaatgcagtctcagcaaacgagcgcccgcctcaagtctgattgcttgacatgtgaaagcgtacttgcagcggcgtatgtgaagtcgaaccagcctggtgtgccttggggaaagaggcgaagtgatactgaccgaccgagaagtatatcgagagggggcgagctatgacgacggagtgggtatgagccagcggcagagctgtcgacccgcgcgggaggtggactacgtacagtaggaggtgcatggtgatgatcggctcgcagctttcgtacgctggggcgaaagaaggcgagggtgtcgggtttgtagggttaccacacctgagcgtgtgctcgtatagtagttctcatttgtcgacttgtttgcaactctcacgaaaatcaggcgggtgattagtaagctggatcgagttcctgcatgaccacgtactatattgatgttggctggtcccatgagcgactctgctcgaaccgagaagaagccctggaacgaagcgtgtattaagttcgatggagaagataaggtgactgagctgtatccggtgatgagcaactactcgtatacatgacgctgtagggatcgttggacgagcatcgggtcaggatcgaatgattaccttgctcgcactcgatctgggcattctcttcgcacatgatacgttattggatgtgttctctgcataccggatcaaatagcaggttgtaaggtggaccacaccaaagtcagaaagtgatccatacgcctcaatcgagcccaggggcttgcttgatacatattgacggattgtgcgtgaagggccaacatgactgagttcgcgagtctctaggaggacctgaagactggcccacagatggcaacaccgtgaaatgcagcagaaataggggacggcgtagcggtccctttctgtgacgagagagagagagggagagagatgaatgcagtatcgtataggtcgagagctttccacgtgctctcatggcgatgaagtagatgataacggcgtcagggtggatgacgacgagcttgtaggtttaggcagatcggcaagatattgcagccagcctcgtatgcggacctgcaataccgaaatcgcccacgactttatcttctgcatgatcgaaaggaattcgatcgctcctccaatatccgtcacatcacccagccaaacctttgacatacacttctcgtaatcggtagcgcaatgaaattagcgaacgcatagccggaacactaagagatgtcgagatgatagcgcttaccacgtcataaggggaggtgttccgatccgcctcccacactacgtaaatcgaccagtatgagccggacgacgtcgcgccaaacaccacaagaggatcgtcttggcccgagtcatccccatcggcatcgcgtcgcagttgtagcagaagaccaagagcaaatgcgaggtcattggcaagctgattggccgccgcgtacggcgtaccaatcgaactcttggcttcgaagcagaaaaaaggataaacaagtttgatttgggacgctgcatcgagaatgcatgacgcacggagttcagttgtggtagtttgaagggacagatacgacagacacgaatcaaggtggagaccggcttacagacgttgacgtgtgggttcagatagaggcctggcttctctttgagtcgctctataaagtctatcgagaaagggtcgagggcactagactgtgtgcggagacgtttccggctgagttgaaacccgaaagcatagtctggtttggggacaggaagggaggcagccgactccaaaggatgtggctgggcattgaagagtaggtcactcctgagcgtcgccgagggggtcaacacaggaaatcagccttggtcggagcctatcatgacaagaagcgttggcacttgcatccatttaaaacgttcgcaatctagcaaatcgccgcaagccgtctcgatgaccttgtgccagcggttttcgggttcatcctgcacctcgccggcgaacctgacgatgtcggtagcggtcgcatatctagctcgtgcatcccgatacttggatttaacgtcgggatcggttgcggagtcggttacgatccggttcggattcccctccatgatgtagctttgcgcctatatggattgtttgcgaaatgttcacgagaggtaagcttcgtcatcaatgtgtgatactcgaatgtcaaggaccacaagttcggagatgcatactgaccaggggaacatcatgaggcacagtatgagtgaaattgcgaagagatcgacagatatcgaccaccggttggggagcagctgcccagctcacttcgtctagcgagatgccagcaggacgcagacgagtttcccggaaggtcaaggtcgacaagctagctttagacgtcgcatccgatgatcgagacatgttggcgagccgcgcagtaccacaggctctgttttcgaaaaggcggaaacctgctaccgagatctgtttttaagtcagagctcaggctcggctcacgagccgacttcaccggtcttgattgctattaacaagcgtccatagtcgagctaccaaagtgtccctttgcgaacgtatcaggcctcaagctaaccgatgtagggtcaaattggatggaatgaaatgcattgattgcctctcttacaacaaaaaggagatatgtaagattgatcgaggtgtttctgatccaaagacgtcgccctttgagcgcagacttctcgcctactgaagggtttagtatgagccaacgcgttaggcgcggaggctaagggtaggacggcgaaactatgactctgatcttgatctcgaccttgatcgcgtctgtagacggatcttgaatcatgcaacaacgaaaggagccgcagagatacatggcttgtgggcgatcgcaagtcaatcatcgttaatcagctacgctccgacatccctacctatgggtaacgaccatatttctgttcgttcatgtacattgcatgaattcagctcgcatcgctcactgccgttccacaatcctttctaacggtgtcctcaaaatcagaactcgaaaggatgtactctttgtacagcttcagtcatttgccaggcttttgtatctctgcccgatcaagcatacatcgtcgttgtcgatccgtttcaaaggatgtatctgaatcccagagcatcgataccagatgtagtaaagcctgttccttctcgacgagagtgcacttgtttccttgcgattagggaggcgaccaacgtctcccttcggtcatcctccccaatgcacaaccacatgtggaccaggaacgtgcaagtaattgtgcaatgagatatcgcaacgaagcctaaagcgtgctgccatttcaagcgacctcgcctgtgcatcacatcaccggacctatgatgcggtaaacagcgcaaccgacaaaacggcttgatagtttcaagctgtcgggactgatatcgataacccctaagctctgatctccaagcacgatgtcatgcgatagatgacggttagttcagggatttgtctagagcggcgatccttgcggtcactatcggctcattcatcctcgcacaggagtatcttgacaaggtgttgtcagtgagaaaaatggcaagtcacacggcttggccactcgcacttgatcgctggttccgatctccggatgtaccatccgcagttccgtgatcctcttatctgcttgcgcctgacggatcagcatgctttgccatccctgcacgacctctatgttcattccagtgagaagtcgatcctgctcgaagacggctgtccctgatgacatacttgcaatgtcaatgtagaggttgataccattaagaccatcttcatggagagcgagacgacgagtgggatttaatgaacagggtctgatcgcagctccggaaatacgctcagcagtaacgagtgtctgaccgaggaagcaagccatatgcgagccagtgcaataacgctgacttactcgctcgatttacaactcgtcattgcggccctcttacaatttgatgtgagtgatcgagtggtcgatgtcaaacagacgggttttgttcctgagcggcctcgcagtatcatttctacttccttgagacatgtgagagcttatactagtactctataggcaaatttgcgttctatcgagcttgcatcgctgtttgaacagtctaccggcgcgttcttccgacccatgcgttgagtcaatactacggaaggtggcatattgaatagccgaatattcttgtctccagctgctaccacttctcttcggcaatctgatgaagtgtttgtggatacaattgtaatatttgtgccatttctccgtgagcctggactcggcgaaagacatctgtcccctgagaaaggtgaatgatttaccatgatattcttgtcccgatatgaaataacgatcgtcttttgacttctcagcattgttctgcgttccggatattcgtttctaccatcctgaagtttctctcaatcatcggttttaccggtgcgtccatgtcaagcataacaaggagaagcttggaacgccgtcggaggcaccggcgagcgtgacgttcgagatagtatggagcttcgcttgaaaaggtcagggtcggcctccatgcgcatgtacgagtacaaccccggctgcgacgcaaactcgagtatagccccctcacgaaatatcaacctacccctcagtggcccgacaaagatttgcgcatcacagaactggagataccggtcgttcggggccgcttgttggctatcacccccgtcgatgccctcgaatctgaacaagaatcaaatccggacgatgaacaactcgcttcgactccgcctccaatcatcgaagtgactcccgaaaagaccgccctctcgctcccgctgatctaatcgacctgcccggactcggactcggggtcacccggcgaatgtcatcaagtaggctactacaaggtgcccgttgacgtgaccgaaaagaatgaataccgagaggccgcctcgcgcttcctctcgctcgagtccaccgccatatcctgggaccggggccgcaaaattggtaacggtgttcgaatcgagctcgtacccatcatcaatcaaggtcgcgagacgtcttcccggccgagtccctctgtaggcgatcggctggtcgatcgtgctcggaagagtcctgctcgggctatacctctggctcgtcatcagactgttccgaagcacttggtcctactacgtccgtattctattttcgggtcggcaggacgatcgcgggctcatcgagtacgtgtacgacagatgaaagtgtcgtctacctcgaggggacctcggaggcgctcgtgaggtagaccgcgagctgcggcgtcaaatgtggtggaagaagatgtgtcgggatgggtgccgacgagtctcgtagtcagaagggacgacactagaccggtctcgtgttcgctttgttccttcttcttgagtccgcaagcaaagcttcttcttatcccttgttcttcggccaggcgcgttgcatcgccttgcctcatcgaaaaacgacagcgggaagagttatacttgatagagcttgttccatttgcctgcaccagcgacgcaagagaaagttgttcatactgcggccttcgctgtttgtgttcagagtgtcaacaggtgtcgagatgggaacgagattggccgagaggtcgactgactggagcagacttttcattctcctcataccaaatgtcgaacgtgtgaccagtggtcgaagcgtgcgactctagaagtctgcccatatgcgggatatgcagtcaacgtcgaccggaaaataaccctgttcccgggaagtcttgctccctacaacagctcaatacgtctccgttcgcagcatcaattcgtccctctgccgggcggttctttgcgttctcctccagaggtgaatcatgatgtcgacggtaccgccggctcggggttgctcttccgattacgatgatgtcggcctggtaccgccactgtaccacggcggttcgagtcactcgaagcaggacgatagtttcccgtacagtagttagcgagccaccgctgcagcacgtccaggggcgagtacgagactcgatcttgcctgacctctcagaaaaccaagtcctgatcgaggcgatatcaaccacgttgtgctccgagcggagccggtcaaagtcatgacatgtttctctcgacgatgaacacgagcctcgtgctttcgaggtaggttacaacttgttcaccatcgtaccaagcatgtccctgttcactcttgactggttgaccaggatattaaggctcttcctgttgtattcgtcttcgaacccgctagcgtattcgcgcgagggtccccgccgtaccatcggatctcttcatggttatccgaacttgcttggtttgctcctcgtcagtatctgagcaccccgacaaagttaaacgcaatgccagctcggagcaaggagcgcatggagatttgccaagggttatccagcagtccctcgtagcacacggtcggttcttttggcgattgtcgcatcgcttgttacaggtcacgacgacgactcgggctaagtcttctgggcgagctacggggtctgggttgttgacgatttaatcggtaaggctgagaggtgcattggattatgacatcggctcacaatcgccttcgctcccaatcatggcggctgatccggcttgcttgctttgctttgctcctacaatctgcttcgtcgttcttatgaccgccttcttccgcctcgtagccgttactcccacagccgagcccaaaaatcgccaagcctcccgcgatcgctagggttaggggttaggggttaggggcatctgtatggcgacaagacgacccgagtcagatctgacacaatgtgaagctatcgacccgaagccatgatatcatcgacgtctcgtcgcgtccgcgtagaacgtcccttttcgagcgggatgatccggtctgtcaccggagatttcgacctggctggtcaagctatgagagaccggattgaagtaaaacgccttgttcgagacagccagtcggcactgaagaacttgctcactccgttcgagtcaaatgacgaatcggaccgctcaacagggtgacgactgagataacatttgtctctggtcgacaaggccatggtagtagtcatgttggtgtcatcgttgaacacagcatctccttcttgttacgcccgggtcttatgcttttctttgcagccctacggaatattgttgagacattctcagggccggtacaattgggatagcattcatcttcggacagcaagaacgtggtagtgactttgccatgctcgtagtcgaccaccgcgactttcttcggtcgtttgatacgatcgtcttaccgtgatcttcgatacgcgttgtagttgtagagagagaagaagatccagagcgagagagatgaccgatttcaggatcgaacgaggactttttttcccttgattgtccgatctggaccgttcgaattttctcctgctttgaactagacgtcgtgtcggtaaggaattgataggtggatggggcagcgtgagtgcgtacgatcgggactcgtccctctgcttagctgctttgcccgtcgtccatcgtcgttcgtttgtaaactctgatctctctctctctctgtctctggcgcgcggagaaaaaagccaagctgggccacgaggtcgaggtcgatctcttgctattgttgggcgtcgagtggttggatggttactccgttccgatccgatccgatcgtcaccccgccaccctgcctgcctgccctggcttgcctgttgacccttgatcctctcaatccccgagccgcaagccatgtatgtcgtcgtcgtgctgctggcttgttgaagatgcacatggactgtgatcctcgggagcattcactcgtcgacgttgggtgtggagtgattattcttgagctgagactcttggttgacctgctctctcgctcgctcgccccgttaacttgttcgtgtgcgtgactttgtatcgacttttgactcgaacacacagagacagggagagatctacgatcgagaaatagatccttgttgaattattgatatatcaacctactctagctaccaccacaaccacacctagtcatcatcgattgtcagaggacacacatacacacacacacacacgtctacttctgtgcagactaaaccatcaccccaacgccaactagcatcaccatggcagacgcaatcaaaaaggtattcgcagatcgaaaggcacaggtgagtcgaatcagatcgaatggccgatagaggacgaccacggtcgtgttgctaatcgacgtcgtcctctctctctcgtcctccctctctctttctctctcttcctctctcttcctctctcttcctctctcttcgtctccttctctctctctctctctctctctctttcctcgacgcctaccccgcagggcgaaccgtgagtgacacctttgcgatccatcatcatctacggactagaggactgatatccaactcgcccaaccctatctcatgactaccttacatcgtatcacactgcactgcactgcatcacctatccgatcgatcgaattcgatcgtatcgccatggctatcggatcttcctcaacgatgatcacttttacatcgaccgtgtgctcgctccgcacttgattcattctcttctcgtaccgcctcgacattcctcgacatttctcgctcctcctgactctcctcgcctcgacctctcctccactctcctcgactcgctccgctcgccctctccgacaaaacagcgccttcgtaaccttcctaaccgccggctaccccacccgtgcgagcaccgtccccgcgatgcttgccatggagcggggcgggtcagacgtcatcgagttgggagtaccgtttagcgatccgattgcggatgggccggctattcaggaggctaatactgtacgtccgtgaagccaggccaggcgaggagaggcagaggggatcgtggggggctgatggtggattgcgcttttttcttcgttctcggtcgcattcggactctttcgacgatttatcggatggttcacgatacccacgtcctacatcttcaccaccatcctcgaccggtatcgacatcgccatctcctctggatcgtcctacacgcttcacgtgcatcgttgccgacgtgacgtttcccgtgtcactggatctcaccgcactggatggccatgtcgacctgggacttcataccgtccacccacctctgcatcactttggattcacgtaggccgccctccaaaacaatgtgacctacgaagactgtctcgagtttgtcaaggaggccaggaaacagggattgagagcgcccgtactattgatgggtgcgtgtcgctggtccgactttttgcgcgcagaataggggggatgggggagctgatctcagtctcgtctcgtcttgtcgtcgtcgtcgtcgcgatcgtctggtgtttatctcgaacgcacgcgtggaccctcggctctacaggctactacaaccccctcctctcatacggcgagggcgaggaacaggccgttcgagacgccaagatcgcaggtgccaacggattcatcgtcgtcgatcttcctcccgaggaggccatcaggttccgaggcgtgtgtaccggtgaagggtgagcagtgctcggtagtccgttgtcgatccacgccgatacagggattgatgttgccgtcgtccgtcccggtgtaatacagcgtgtcgtacgtgcccctggtagcaccctcgacgagtatcggacgagtcaagtttttggctggaatcgccgattccttcatctacgtcgtttccaaggtgagtttccgggagatgtgccgcctcgtttctcgccgactgacacggcgccgcccgacctcgtccagatgggaacgaccggatcgacccgagactcgaacatgtccaccggactgcccgagttgatcgccaggatcaaggcgttcacccctgttcccctcgccgtcggattcggtgtatcgaccaggacgcattacgaggccgtcaccgcttcgggtgccgacggtgtcgtcatcggttcccgagtcatcgccgtcatcaaggacgccaagaccgagcaggatatccctaaggacctcgaagattactgcagagaggtctcgagacgtgaacccgtcgcgcccgggaccaacgccgaggctcacaaggtcgaggacgtccccaaggccctgcccatcccggcctcggacccgttgtccaagattcaacccaccgagcaggcccaggaggaagccgcgacgaccttgcccgctcgtttcggtgcctttggtggtgcctacgttcccgagtcgttggtcgactcgttgagcgagttggagcaggctcacaagagcgcgttggccgaccccacgttctgggcagagtttgaatcgctctacacgtacatgaacaggcccagcaacttgtacttggccgagaggttgaccgagcacgcggggggtgccaagatttggatgaagtgagtcgaacgatcgagtcccatgcgaggacgcgcccgtgtgttgacgcaccccaaccccgacatcgtttcatgccaggcgagaagatttgaaccacaccggttctcacaagatcaacaacgccatcggacagatcttgctcgccaagcgactcggcaagaccaagatcatcgccgagacgggtgccggtcagcacggtgtggctaccgcgaccgcttgtgccaggttcggaatggagtgcatcgtctacatgggtgccgaggacgtcaggaggcaggcgttgaacgtgttcaggatcaggatgttgggaggaaaggtacgtcggtcgggatcgtgtcgtcctatgccgcataactgacacgctttggacgactcgtcaaggtcatccccgtcacttccggttcgcaaaccctcaaggacgccatcaacgaggccatgcgtgaatgggtcaccaacttgaagactacccactactgtgtcggatcggccatcggccctcaccccttccctaccatcgtccgtgacttccagcgagtcatcggaagggagatcaagcagcagatggccgagagaatcggcaaacttcccgacgccgtcatcgcctgtgtcggaggtggaagcaacgccatcggaacgttttacgactttatcgaggagaagaacgttcgtctgatcggtgtcgaagccggtggtgatggtgagtttcgcagtcccgttcggtcatcccgttcgctcgctcatccccgctttacccctcttacctaggtgtcgagacggcccgtcattccgccacgttggctctcggaaagcccggtgtcttgcacggcgtcaggacgtacctcttgcaatcgccttcaggtcagatcatggagacccactcgatctcggccggtctcgattaccccgtgagtatcgtatcgacgcaggtggttgcatcgcgccgtactgaatggttcacctacagggtgtcggtcccgagcacgcctggttgaaggactctggacgggccgaatacattgtcgccaacgacgaggaagccctccgaggattccgtctctgcacccaactcgaaggtattatccccgccctcgaatctgcgcacgccatctggggaaccgtccagatcgccaagacgctgccaaaagacgccaacgttgtcatggtgagtccggcgctttcgcttccccagccagacagagcacgacgttgacacgctgctgtgtaccacccctccagtgcctttccggacgtggtgacaaggacgtcgaacagatcgccgacgctctgcccggcaagtgggccgagaagctcgactggcacatcgtctagggggctggctcgctgcgccccttttcttgccccaggctattgaccatctcgcacgcatcatgtatcacatcaaaaccaaaaacacctagattcccatgacgaacattcaaggcatgacccaacgacatggcttcgatcatggtgtgctgcctccatcgctcgcactacctcccatatcgcctgcaccgcctttgctgctcgaacctcctcccttgccgaatcggctcgaattgatgccttccttctcggcgtctcctaccatggccattctccctgcaaatcggtcgtctgtcgtagtcaacaaaggtctggtcgggccccgaagtggtacttcttgaaggggtgccaggccgtggacctcttccgagtctgcaaagtagaacgacaaagtcatcagctctgcaagggaacgtgagatattgttgaaaggccgcctcacccggctggcagagatacgtcatgccaatgttgctcggagtctgcgcaagtcagcataacatgcgaaggagagtcgctcgcgccgatactcacctcattgtccgcaccggcaccataaggccttttcctgccgacggtccgggtaccccatcgtgctgcagactgttcgtgagcttctttgcccaagggcacttgagacaagcgggcgagttcggcgttgagcgtcttccagataagtactgccagagcgaccagggccatcttttggttgactgtcaagagggaaaggctgtcccgtcaattggatgaaacgagggctgacaaaactgtcatcgctgaccgtatgccacaatgatgacgatgcaaagcgccttgagatgcgcaagcctcctcttccactgcttccgacgctgctggtactcgtacttccggatggcctcggtccgcttgctctcgatcgaaccctcgtcattctgcgacttttgtgccgctgccagacgggtctgataggcttcgcctcgacctttggaaaagtcgccgattttaggagctacacccgactcgaagtatagatttggcccttccgatgaagcttttcctagcgggaaggggaagctgttcgacctcggagttagtggcgatctggcgatggctgcggcgaggcttacattctaggtttggcatccacagtagtgagcacatgactcggatgacttccgtcatcttcccaaacgggcaacttggaaatagatacgcttgctttggcttcttgctcttttgcttctttggcggcatcctgcagcctttgcggcacctccttcaacttttcagcggctgccaattcggctgcgtggtgggtagtcagcatctgagccatcgagatcaatgtgacgcctccgatagtgaaagctttaatcatgcgatagaagacgagagtctcgtcactgagattcatctggctcatcactgcgaggatgaaaaaatgagtacagcagcgacgctctgcttccaactatcaacttgccaatggtcatacagcttgtcattagcagagctcgctggacgtggccgtattcgaaggggtaggacatggtgttctctgagttgttgattgcttagcaaatgctgatttcgttgagacaggtcacagtatgtcaaaacagctcttcacaaacatgtataaaaacgttccaatcaaaggtgaaacacgtttgcttcctttatgctattacgcatctccttagcgcgactttacgtttcaatagtgaacacctgccatgtatgcctgctaaactgcgagaatctgctgaacgcccgatagttgttgtgatcatgcgctaggtacattccagcgtatagatcaaccctatccaatgtcttctcccgttcaatctcaggcgatatttctagctgcctcttccccactctttgcctattctcctcttctttcgcgaaacttgccgaacgatgcgtcatgggcgatctcaccctcatctaattcctcggtagtggatcaacgtattgttgcggcgataggtagggcccagtcaggtcaaataggagccgaataccagaccactagtctcggcaataacggttccagcgtgatgctagccaacatatctggtcagtctgggttacccatcgaatctctaccttcacgtttaagccatgctgtggctatcttcttgcagccctcgctgtcactcccttcttttccgtctcaaacgaatcagtcgcttctgaaagcatgttacagatcgacgctgatgcaaagatggcactacctggttccgggactcggatcgatctcagtcagacgggtggcgaagccactaccccagccccattcgcaccccatactgtacggatacgggtgatgtgtgggcagtcgtgcaatccagagcataacttcctcttccgaggcgctctcgtagaaaccctcttggtgccaaccgggttcgtccacgctcatccgggtgtctgaccgaaattgacccccatccgtggcatagcgcaaccatggtaaacgcaaccatcgatgattcgtccaaaatcgtcaactatacgggcttcgccactggaggcaatcagaacaggacaatcttaccggacgacctggtcggccgcagccgcgataacacgctgagttacacggcaacgcgttatgcgaccgcaaccctatcattcaccggtgcgccgatgatcatacgaagcaccatgtaccgctctcacgaactcggtcttgtcttaggtactgccgttgaaatcgtcggccctgtcggccctacgttatcgacctacaccctaacggtagacggacagaacaccttgacgtacaacgcttcagctccggtctttgttgctcaacagactttgggcttcttgacgggactagtccagcaagaacacacgttgttcattcggaacgaggtcgaggggatgggattggcgctggattcgttcaacgtatggggtcagggtgttgcatgttttgggtaggatcatgctagtctatccgcttgtctcagagctgaaccgacaagcttgatctgcagaccaggctgcgcgactagcgtgccatctccaccgacgataccgcctgcagcccagactgtgcaaatgacggtcacgcctgtcgctactggcccgggttatatcgctggggagggcgcatcagccgggtccgtggtgggtggcatcataggtgccctgatcgcgctggtgagtgttagaacgcacgggatgatcccgacacaccattcatatgagacgcacatcagatcttgctctttgcgctctggagatggatgtccaaacggggacccaagaaggaggaacccaagttggacgctcacgatgccgcttgtgaactcaagaatcagccggggcatttcgtcagtgttaaacccaaagaggaacaagggtacttgtatcgtgagtgccgccgtcatgtacgaaacgatccagctcggcatcagtactgaatccctgtctcgtttgcttcgcagccggtggcacagcgggaaccccgttttgaacctgtcgaaagccgtgtcattgattatgccatttcgcgttgctatccattccgatcgacattcgcgtgtcgtttgtttcatctatctatttgcctttacccttgctctccttgaaatctccaaacggatcttcatcttcaccgtcgctatggatccgggcctcgaccgaagcgtagacgggaggatcttcagacggtttcgcaccgtttcgcgctcgtctcgactgatcttcctcttcttccgcctcgtcgaatagtagaccccctcgttcgccttcttctcgtggtcgggatgagctggctcgacccttatccttggcgataccgtcgtcgaggtcgtcaatactatcgtcgtcgctgacatcgcctatcgcccatgcctgattcgcgctccctggtccgtatccgtcctcactgagtttgcccatcggacttcgtgccgaattgcttcgcgttctcgtgctggtcggtcgtccattgccgtcccttgctgatgacgtcgctgcgcctgcttgaccgcgggtgccgtggatgggatgtaatcgcatcgatgggttggtggccgagatggtgttgccacgaccgggtgccgggtccgtgtcgacgtcggtctttttcagcgagagcaggacctgtccaaccgagcggtgtcaccatcagctgtggccgatgtacgggtcttgacggcctcgacttacgacaccggcgacgagcaacgcgatcgacatgaaaacggcgaccaagacccaagtctcgtatgcccccgattggttcaaaaagatcaacgagttgacaaacctagcacgaacgaggttttgttcttagcgaccagacctctgacgcaagacttgagacggaggggagtgactcaccctaacacggtgtacccggcgtaaaacaaggggacgatcaaggtcgaatcggccgccttgagtcccttgttgaggcagataatctggaggatcgccgtgagagctacaaagaagagcgtgacgagtgcgaccgggtgtgtgaactgcgatgcgagcgggttcagtgggggcgccgatacgtctcgggtgatctgtcaggcgactcacgggttttccgggcaattgcaacagcttgacgctatccgggatcatctttgtcagcacgggtaatatcctaccgagacgaggcgtggatgggggactcacaccgcctttgtaaacaccaaacaagcacctgccagactcccgccgacgacggcccatccgacgccggtcaaccacaacaacctctcatccggggtcctctccaacaacctttcccccctggtgaccgcagccgattgtcctcgactccagatggccatgccacgcttgacaaacttgacgaccgggttggtcgtatcggcctttttcctgcctcccaacgtggcggctggagcgtccgggtcgaatgcgggaagggagggcgagagtgattccctcgatttgaggatgagggtgagggtgcgtgtgacgaggtaggtgaagaatgtgagaaaggcgatgacgaagaagtaggataaccagttcggcctggaccacagcatcgacaggctagggatcgcaatcgcgatcgagttcagccggtggtggtcttgttgacgctgcgacaccaggaccgaacgctcaccgttctaggctgatggaaccgtcgagcccgtgattgatagaggaaaagatcaagatcaagatgaccgcgacgacgatcaatgccgtgcccctgacgtcctccttggtgacggctagatcaggagtcccaaggatcgattcgttcagcgtcacgacttgtaccctttggtggaactcggcgacatcgagcgcagactcacgtgtcccgacgagccatttggcgaataaaaagttgaaaatcagggaagtcgacccgagtggcgctacccagtctgaccggaggtatcggagggacaaggtcgatccgactgtaaagccagtgtataccatgttagagtcgagcggtgtgagcgtttgcgtccccattcgaggagattgaggacctttttcggtgactcacataattgcgagacgctggtatcgatgacggaccatacgagtggaggcgaggatcatcccatccagacaaaccgaacccccatgtcatttcattcatttccatcccattgcagtccaatcgaagccccaaaagtcgaatcacgcttatcagccttccgtccgcatccctgtcttcgcctgtcccgggcaagccgaaaccccccccgacttgctgtcgaacctaaccgaatcgactcacatgtacgctgtcatccccgcgatccagacgggtcggaggtaatccggccttctttgagatttaggtaatttcgagtttctcatctacaggtccaagcgggcgcgggggaggtcatggtgcgatatgtcgggacatggccgaacgggtgcgggtaggagagtagatcttaggatgagtacggctggagcgaacagtgcgtataggggtggaaaacggtcgatgggggctgggtctggacgtacgtggtcgagcttggtgaggtttaatccgaaagcgttgagtgcgctcgagcctagtacgatcaagagtccgaggatgaggttgacctgttgtcatcatcatgatcatgacgaggaagaaaggaagccgacgtccgggaatggaaattcagatgagcgtcggtcccagagtcatccatcgattgttgctaagaacgtgatgatactcactgccgggttcccttcaccgaccgtctgtcccgcctcggccccgcctacatcgacgatcaagggggacgtgttattccctggtacgacgtttccgtcgtcgtccagtacgatatcgggatcaggcaagtctaggtcgggtgaggaagtaggcgggtctatttgttgtggcagatcgttgtcgtcattgacgtccgggtcgaaaggttcggggaggtccggttcgttggtggatgggtctgattcgaccgggatgtcgcccgtggttggatcttcgtctacatccatcgtgggatcgccagcttgggtgccttatcggtttatatcgatgtgaggatgatggatagagtagatgtacatatatagttgtatgatcatttccctctttatctcggttttgggcccgaagcagcagccaaagtcgcgggaaagtgtgaaagtgagcgaacaaacatcatatcatcgtatcatcatctcatcatcgtcgtcgtcgtcgtcgtcgtatctcatccaacaactctaatcttggcaacacagtgtgaccattgacgtagtatcagatcttgacgacaaaaaagaaacgaaattcgccggatttggacgaggggaacgacctacacaaacgggcattccgataccaaatgttcacgatcaatcattccgacaagaacaactaaagtgaccacttgctcgaccctgtacaggtgacccgtcggttcattagcagtttggtatctctctggaattgagggaaactaaaatgctgaataccgttggagacgactcggcccttggtatatcatcaaacgaacaagaccgtgagctcatgttcaccacgacttttgatcgacattgtcaagcttatcccttgttactttcgtagtaaccaacttggacgccgcacagctcaggaacctcttgctccaatctcggaacgtaatttccaagctcaaactcgagctccaatcgtcctcgttgtcatcaagctccaggcactccaccgttccctctagcttgggcccgtcgagcggtacggccggccaccccgtcctcccctcgagtcatcatgcgtacgacctcaaacgactcgccgagactccgaccggggaagaccatccacaaggtctggtatacgacctgaacgattccgatcacgaccaagccggggaggacgggcctgaacgttcagtcaggtcttccacgcccatcccgaatttgaccatcaactcgaactcgattcctaccgacacgtcctcgatgacgagacgcttttctgaagaccgtatagagacgctcgatcctgaactatcgagggaaccgccgggtcacgccgaacccgaccctgaccccgaacccggggtcaccaggaagaaacgcccggcttccatcctcggtctcaagaggatcccttcctccatcgtgcagaccactgcagcgcttcacgctccatcatcagcatcttcccatcctccttcaccttcccggaacctctccgcctcttcttaccccctaggcggtccgaattcgaattcgaatggcgctcctaccccgaacacctcccgtccgacctcgcccggatttcccgtgatgctagggagcaagacccggaaagtctccggcgtggggacgtcctcgggccgggtgatcgaagagctacagaccgaggtgatgggcgtcaaggcggggttggagaggacgaagaacgatttaagactatcacaacgggtgatcgggcaggtgggtccgaggtcggaggtcgtttcgccttgaggatggttgtgtcgggtttctccgggggctgatactcgtacatcatccgtgcatccggccctgattggtgatgatcagctcacgcggcagaacgatgatctcagggagaccaaggaacggttgagggctgagttggagggtatgaacaagcagatggataggaaacaaaagttgttatccggtgcgtaccacgcctctttccatcctcatcacgtccctttaccgactcgacttccctatccggttgctctcgcccctaccagaggtcctggaacgcgcacggaccgccgagtcgtccgtccagacgcacgtcaaagaccgtaaagcgctcgaaacgtcgacctcgaaatccttggcagagatgacgctcaagctgcaagaagcgcagacgctggcgggcaagagcgagagagagtcgatcgtcctccgagaagggttcttgcagtacaaggagacgcacaagcgggagatggccgagttgagggaggagattgagaggttggcagaggggacgaggagggagatggaagatgccgtgagtcgatgtttaagtccgatagtccagtagcctactaaggtggtttgacggtcccctagacggtcaagcggaatcagctggtcaaggcgatccaagcccgaaggtgagttgatatgcctggccaagatcatccaacagggcccgagctgatacaatccctcgaacgtagcgcctcgtcggccatggtggaagacttgctgcgcgaatcgcgcgctctgcaggatcagagcgaacaacgtctgttgctcgagatcgaggcgttgaaacgggatctcgccagtgatccttcgacccgggcgttgcagatggcagagtcagtagacttgtcgagctcataggcggggagcgacggatcggcccgttgacttggtgctactcgcccttgcagatcgttgacagaggaactggcacggatgaaacgtctcgtgcaggccaatgctgcggatgagtcgcaaagccacccatgagcatgttcgccagccatgtcaccacacttccgcctttagaagcagtcggaatttccctaccttgaacgccaccactttcacgacaatatacgacatttatagacggctggtcatgctacactccttcatctagaggacagcgatgtagttttacgtttatgacaccaatgatgctacaaacggtcccacatggcgtggggttcgagggtcaccatgccatggccggactctgtaatgtgaagccaagaagaggtgagtgggttgcgcaatgcaacccaagccgttgatgttgacaaggttttagaatcaggttgacggttcttgttgcttggcgtttgagacggctatgtcttgaatcccattacgagacatgttggtgcactgttgcttcttcgaagacgaacctgccagccggttgtagaatacgaatagttacatggcacgattactcccctgaacaagcggctcttcagctcggccttcaatgtcgcttttactcggttatcattctcgcaagagatctgaaccatcatacgggaggacccggtccacttttttcgccacgcattggagggaatcgtcgccgtcgcggaagtatcaagagactgttgtgtgatatggcttgaaactggatcaaactcttcagcgtatcgttcgatccgacacgatcctctcgaggcgagtaccgcagtgcaatctttgggatcacgagagacgtggaaacgaatgtgccgaaacagaaccagcgtggttgacccgtgcttgaagcttagcgatctcggggactgtcgattcttatccaggatttcgtgcgattgtcgctgctttcccgtgttggacgagacgatcaaggcgaaatcttttctacgtcacggcgaggacccagatctgatgaccgtttgtggcttgcctacggcgtagctcgggatgagatctgtcagcggaatgaacttttttggtggaggcacggcccgtcggaccggtttcaaccccgtttgacctgatcaatgacaaggctggagagtcggatctaccgtcgtgtagccaaacgatgataggacgcaatgtcacgaaacaagatgaggtgtaattctcgagatttgtagcgatcgaatcctatgggaaggtttaaaaaagtaccttgactgttgaccgtatcataatgataggctgagctttgtcacagatgctgactgacggatctgtccttgtgctaattactcgactgctcgtaaacccgcggatgagtgacgagaggtccggctgatttccaagagcggcccgtacaagctcagacgccagtaaactgtagcaacgggatcaagtcggggacgaagtaccatacctgcaaggtggaaccgtgaagcaagacgagacccggccgggatcgacggccagcattcatgatcacaacgtgtttcatcgcgaagagaatgtcatcgggtcctaaatgttgacaactcggaagcttttcacggaagcttttctctccgtgactaggtgagtagctttcctcgccaggattcgacttgtcaaggcgagaaacgggaccgatggaggaagcggtgtaccttgtggtctcatcgggcggatcacggattcaagttgcagtgtaacgactcttcgatgtgctctatagaatcaactcgaccaagatccgccgatggatataagtccttctccaagtccttctccatgcaatttacttccgatcatctcttctcgtcatttcgatatttgcttccggatgttgactttcggtcgatacgatgaatgttgtgatcatcaagaacgatcgcaacgaccttgattttctcataagatcacctcgaccacgatcgctgccacgttattggcctaatagtatcgaagctctccctccatccagataatcacctcgtcaaggatgtccactttcgactttgagacctttctgcgagccccgtcaggttcgtcgaccctgcccagttcccccgaacccatctcgacggatcatcaggaaaaactggtcgagctcgtgtcaaaattcggggccgacgattacacgctggatggggaccgtctcagcccgtgggagatgtcttttttggtgagtcgtttgatcctcggggatccagctcgtggactcgcaaggctgatgtcaagggatcgcgatcataccgacattctcattatgacctcccgctcatcattaccgacccatttctctacagtcccgtgaaggtctccttcgtttccttcgcgcagacaggttcgatatcaacctctgtgtggaacgtatcgaaaagtgtctcacctggaggagaaagactggggtggacgatcttgagagattggcgaagcgggtcgaaggggaggtgagttgatgagcgtcccgtgggggaatcaaatacgatcgtatgtggttcggcggctgatggatcgttctcgctatgtacccactactctgctcgtctgcacctccctctctttcgcctctgcgtgacaactgtgctttcccccactgccaccatcaacacctccatctcaaaccaataaacccgaccccgaccccgattccaaccctgacctcgacctccacgcaaacagcaaaaaacaaaaggaggtcaattcgtctttgggtatgacaagtcttcccgacccgtcatctttatgcacccgtccaggcgggaagaaccgcctagcgagttgggtctgattcatctggtgagttccgggtgcgcggacgacggcgcattcggtcgacggttcacgtccgagcggttcctagggtaggcaaaggaaaatgctgacagcttttgtcccgctcatcatatggtcagttctatctgtttgaacgggcgatcgacctcatgcctcgaaacgtcgagtgagtggctcgcgggcagaccaagaaagagacgggagcgctgagacgcacctccgcgcggaccgctcgaccttttagaaagacggcattcctgatcgatatgggtggaaaaagaaagcactcgacaccgatcgggctggccaaggattgggtatcggtattgcaatcctgctaccctggtacgtttatcgagatgctcatcccccggggcatagctggacgctgaccgttctcgctgtgacacgcagaacgactcggtttagggatcatcgccaacgctccttgggcgcttagcatgttcctctccctcgtcctacgattctgtgatccggcgacccaggccaagatcgtcgtcgccggatcgtcgaacgaaggcaaaaagttgatcgcggacacggtcgccgaggatcaattacaggccgagtatggcggtcaacattcgatcccttgggacgtcgaggtgcacgatcgatactggcccgctctgatcgaggtgtgtaaaaagagacgggcgtacaggatcgagaggtggcaagagttgggcgggaccgtcgggatcagcgaggaagagtggaaggggcgtgacgagtagacgagcaggcgagcagacgagcaggaagggacgggttttgcgtggtgcttccctttcatctccgaccgagtgtgacgataatttgcatataatagaggttgatatgaatacccttaatgcgtgatctcgtatcgagagccggacagtaaagtcacggatgtcgatcgtggtgtcagtccatcatgtaattggggatccggaccctagcgagccgtccaccatcgccagaggtcaggaccggcatgaccgggtgcgtgtgtagctcgattccgaactctatcgagggacgctcggaagttcaacccgcactgcaaggtttaaagacagagcgcggcacgattccatctaaactgacattcgactagctagctacacaagacgtcttctcaattgctttccgaccggaccgatccgtacaaacacattctgcgactctacccgtcacggccgaggaagaacccggttcctctttgccggacgtatccgagtttgagataaaggggccgatggacgactgggcgaccgggcgactggcgatacgccacggaagaaacccccgactatgaattacatggcaggcgcaccaactcgtctcaaccggccttctggacgatggtgggcgccatgacctcgggctcggtatgcaacaccttgagatgcccatcatggacgtccggatcgttcaacccgtgggcatcgtgcaaggtcgctccgtccgacgaagtcgcgctcgagacgctcgtacccatcctctcgtggggtcctcgttgtgcggccagaggagcggtcgaggacgaggttcccgagggtgctcccgtggacgtctccccgatggtcttgtaatcgtattccgaaatgcctacagtcccaccgagcgccttccacatggccttttgtcgattccgcttgtccatggcgacctggagcaatgtcggccagtactcgtcgtgattatagacaaactgtcgggtcgggtcgtcgtcagtgagatgttgcgtggtttcaggtcggggtcgagcgtcgtcccgttcgcggtgtgacttaccggcacgtccccaccgtgatccttcaacgcggtggatttgggtatcaacccgtccttgacaaacgagctctcccacgagacctagccgggcgggcgagccaaacagagtcagcacgttgcattcgccttcgtgttttccttcgggaaacctcgaccgacgcgggctcaccttggctttcgtcacggggtctacaaacttgaagatgagatcgaggaatttcttgaccatccacggcaagtttaatatcacggcctgtgcgacgtaggcgccgggtcagccttgtcttttcaaacatccgggtaaaaatcgacccgaccccgagccgggcgggcgggactcaccgaccccagcctttctggataatggttccccaagatctcgacaaacaatttagcctgtgccacgctcgtcggcgctcgactcttgcctgcgaggtcgatgatcaagcataggttgctgtgtgggtcccgggggttgacgccgagtgagaagtgaggagtggtcgtggaggtcatgtcgacgtgcgcatgatgatggtcatcgggaggcggatgtcgtcaaaaggaaggcggtcggggccgacacgtcgcgtcacgtccgtccgtgccaggttaagtgagcgaggatgccgaattgaacagaaaatcccacgaatcgttgacgtccgggggtgaggaggggaaacagaaagaaaaaggaaaaaccgtcataccccaccgtcagccctcctttcctcgctgccgaccctgaccccttcgcgacgccagccgactcacctgatccccggtggcatcagatcgatcgtcctctccaacatataaaccgtatgtctcatctgcctctccccgacctcggtatcgctcctattcgggtaaaaatacaggacgggttctccgcgcttgctgtagccgtagaggaattccttgccacagggagattcgggtgagacttggtcggctactgagcgtggggagtagaggttccaggattgacggaagaggaggcagtttttcagacgggtgcgggtttggacgaggtcgcccttggtcgcttggaggaaactgcgaatgagggagggggagcgtgggttagcttttttggtgttgaggttgaagaggattgaccagcaaggtcggtcggtcgagtcggattggattgaattgcgggggaggaggatgtgacggatcacatttctacctctcatcccggtcgagtcacttcgaaacgcctcgcacacacacgacctcgtgatcacgcactccacccctccgcgagccccagcttgatctcttttgaacactcaccgagcgatacattccctgctcaaccacatcttttcatcctctgtgagatcatcccgctgtttatactcgtccacgatgatcttgaccttgtcctctgtcgcaaacgtcgacgaggacgaggaggaagacgcttgggcttgccggtgaagcgccgggtcgggaagttgaagtgggaatgcgagtcgttcgtagagcgacatggttgttggtcggggcgcggtcgtcggtggtggtagtgatgcggtgcttctggtcgtatgttatcacctagtgtttgcgtagggactattagctattagacagaaggcgacgggtggaatgaggatgataagctacccacctacctgtaatccctgtgacttgctactctgcataatatgtttcccatgactttgcgacctccctcggcgcgcggcggctaagaagcagagcagggtggaagtgagaattctctcggcattcagatccatctcgcccgcccgcaggccccccgcccgccctgcctggcctcggcccgagtcgtatcacgtaatcttcgtcatcacacacacaaagattgatcatcaacgctcctcccccgctcgctcgctcggttgctcggccggccgtgacctgcctctacccgcgcgccgcgccagagacgcccagagattcccactcgctagctcgctcgccaactcgtgaccaccgcgccccgctgcgtttccctttcttccgccgtctcgcccgcgccttgcagccggaggacatccatcacaatctatagcatattccatcatatctggagagaaagaggaccccgtgtggaaatcgttgcactcgggacgattcaggtgtgatgtgacctgaaggaacagacggcgatgtgcgcgcaccggtgaagaaatcgatcctcggcggccacgaaaggcaagcaagcaaaagtcggaaatgggcaagggtgtttcaattgctacaagtccccctactactttcaacagcatatgatgcccgtggagatacacaatcattctttaagcttccttgatcctggtcatgacatgacaacattcctcgacttgcttccgatcactcggaccggctcggacggtatagagggatcgagcgaagcgaaaagaccaccaccatgtcatgtcccctcgttgaaagccgattcacgaaattgacaggggggtcgtcatcatctcgatgatgacccttgggctgtacttttcaatcacctcatctcatcggttgaggtctcgagccaccggccctgatcgacctcgagagcccggtcgccatgagctggccgtccccgcgcccttggacggacatcgggccaagctcatgacctaccgcggttgaacgcatagaggacttggttatccgggaatcgacgggatatcattatcgtccaggttgtcgcacacgggtctgtcattcctctctatatacacagacgaaactcgtcactcttgtcaacaaccctcaccgccgggaacgctcttctccgtgctgcaaagcgctgccaaagagcggaggtgtatttcaatgataggatcgatcgacttgttcgggttcaacagcgtggcgacatgatgttctcatgactacaacgattcagacccctaaccccgtacgtccaccaatccgtaaccccatttattgcggccccgggtgacctccgaattcaaggcctactgccgactatcgtagcgctcatccaaccctcgacattcacttggtgtagtacgacagatcggcctttttcgaccattcggcgaacgaggtaggttcacgggcgaggtaagggagcacccaggtggtatcctgaccgccccagtctgagaattaggcgttcgtgcgagagagagagggagagaggactttcggtcagtctcgccgttccctcgattcgattcccagagccatccgcggaaatagactcacatcccgtgtcaaacatgtattgccaggtgtcgacgagacagtcggtgaggaacgtcggggtacccgctggaaacccggccacaaactcttccggagaatgaggtcggatcttgaattctttaccggtggctaagaacgatcaggaatcaggacgccgtcagtcatgggatggactctcctcgccgcctccccccctcccgatcgaaagtgaccttgagcgagaatgtcggcaatgtccgtcaatagcagtgaatcgctctggcacaagaccggcctcgaatcctccctgacctctttctgctcgatgatagccctgacccatagcccaaagtcaccggggatatcgatcaccgggataggttgactctgaatctctttggtcgacacgggttgttcgctgtagtagactccgtcatcggaggatttgctgaaaaagttcaaatcgtcgatcccttggaaaccgctgttgaagaacgcagcttggacggttcggcagcggaacacctcgctggtcttggatcgaccatagtcgtcaatttcggccttggtatcgactgaacaagcgcatgcggtcgacagaggacaagtcagatttccgcgaaagcagacgtcgactcgtccgggccatactcacaggcatacaccttggtatgcttcccgccggatagcttggaggtcggaggaagaccggcaaagatgaacaatccgaccttgctttcgatggcggcatcgaccatggccttgccctctgctatctcatgacccgcgtccatgtgttcccaaaagttggtcacggcctgcatcgagtccatccgagaccagggggcatcagcgggcgcgactaacgggatcatacgccttgggactgacaaagacggcatgggcgccggaaaaggcctcgcgcatgcgttccttgttctcaggtttgaggtcgatctggaacgtctcggcgccggtagcctcgatcttcttggccttggacttggtcgagtctcgagtcagggctcggatccggtattccttgtcggattcgcggagatggttcaagacgctaccgccttggttaccggtctcaccgacgacgacgatgaggggagcttgttcagattgaatgatggtcatggcgtcaagaggttgaggagatgtaattggagatgttgttggactacaatgcgggatgtgtgtgagtatagagaaacaagatgcaaaagttgtcaattgttcaggtcaagggtcacctcttatacttgttcttgatccatgggatcgaccgcaagaattggacgcccaaggcgagcacccgggctcatgtcgtgacgacgacctgcatctgagatttgcaaggcccaaacggtggagattgccaggtccatgcaagatccggatgatcaatcctcgagttttgtcagacgattgacgatacggggtctatcgataccgtcgaggaaggcggagcacaagttcagtagatcagtagcttgtagaggtacacatgccgtgcaagtgtgcgaagatacccttcagttcaggttgataagcaacggggtcccgacggacatcggtagtacggcggacaatcgtgccaagcgtttcggtgcgagctgacaaaaggtttaggggacggagttgacgccggaagataccaaatgggcgagtgtcagactttgaattgaactatcgtagatctcgatcgatagagtccgtacaacccccggttcctctcagtcactatcgaactctacatcgtgagatgtgacgaccgatcaccccaatgtcccagcgtgacgcgtacgcacgtggcccgacaaggcgggtaacctctttgcggctccgggctctggaccgccgacggcacatcgaatcagttagtagctttcgagggggttgtagcagtaataactgtatgcgatgtggaacttctcgttcctccgtctaatgtgtgctccgagcggagacgtcggctgctactggactacaagctcgtttcgaaggtcaggtcgagcatcccccagccgcagcatgattcagccaaatctttcctccgccgtctcgcccgtccccggcccaccacaacgctacgcgttccggccgccctttggcgccagtcgctcgcgctagttatatcgcgcccgatttcgaaagatactgatctcggctccggctaatcatccggtcccccgtttcctttgacgtgtttcatgacggagcgggggggggggggacgcgtttcaaattcgaacgatggaacgcatagctgggagtcaggatttcgttcttgtcattgacggccatcatcacaatcgtttgtttgaatcttcaccattggaccaccccccaggacttctacaggcagcgctaccatctgtgactccccctcctcttctcctagtgtttcctcccgcacccccaccaccaccaaatccacaccctcatgagccaaatcgtcacagctctagcatttattgccgcctccctcgcgttcggctcaaacgctcgttcgccaggatcatgggaacagatcactcgacggatgggagatggatgggagaggttcgtccagagggtcttgcccgagacggacgcgaggcgcggggaagatcgacccgactcgcgttcatcagacaggaatcgagaagaagacgctcgatcttggagggataaagatcggggttcgaaagaccacgagcaacgtagacctattcccgaagaatccctcttgggaccgcctcgatctcctctcacatcatcgccgtcgtcggcacggaacctacaagacttagagtccaccatcgcgcgcgcgatctctcgtcctcaacctcagcaaacctcggatacgggctgggaaaatatcctttaccatctcctcggaacaggttacggaagcgccctgagttcctcctcgaggtcgtaccatcccggatcctcacgctcgtaccgaggcgaagatcagagcgacgctcgtacctttgttgactcggcgtatgaagggtctccacgctcttcggtcactggctcctcgcctaggagatctcaacgcggggtgcggggtgaccccggaggagcgtgggaccaagacgtcttgccctcgccctctaaaccttcgagtcaatctggcgggtctcggagtatccctccagagcacctcgacgggaacatgacaaagaaggcagaaaacgcagactactttagcggggaataccatcgagcttctgatgcacgcgataaacgtcaagaggaaccggacgtggacgctgcgatgcggggtcgattgggttcaaggaaagaccagaggctcgaacgaggtagggcgggtctggatgagtctaccatacgcagacgaggagattcgggggaaagagtataccgagatggaccgtacgaccgggaatacagcgatgaacgcgttcttcatcgcgaccggtcgagaagagacaagtctcgtggcggtcgagatatgcaggacagagaagaccgcgactaccagctcagcgacagtcggtatctggagagaggtcgtgagagggcacgtggacgtagtagacggggtggatatgacgacaatgacgaggcctacgaaagtcggtatgatgatgaccggtatgcaaatcggagcggccgtcgggatcgagagaggaggcgtggcaaggggtatgatgataggtatggtggtcacggtcatggtcgagatcgcgaagaggactatgacgggacgaatttcagggacgaaagatatcattacaacaagcgccgacctttagaagaacatcttcgggaccacgagggcaatcccatccatcctcaataccctaccacgacgtctgctatgccggtgatagtcaacaacgtactaggcgggatgcccatgtcaacggacactttgacgactcccgagcctactcccagggacgcgccccaggccgagcgagaggaaatcacaccagagccggagtcagagagactagagcaagtcgaacagcccccggaggaagcgcttgatggggtttataagaccaaggaacaagagcaacaagaggcacggaatcgattcgccgaggctggagccacccatgcgaagaagaagtacccaaaggtgatcaataagagaggaggtagagaggcaacagccagcctagaaagcatttcgaatgatggactcggtacggttgacacagatactaccggtccgatactccttggccaagcgctcgaagtgatccctcaacctccgacgtcaaacggcgagtctttatcgaccaagcacttggagccagaagttgtcgtccgcaactcgagtccttcgcctgactctcattcggcaacaaagccggtggaacgatcggaaagactgacagacgaagtccctgagtcgcctgtgggacggaaactcgacacgcttccactaatcgatactggctctcccatgatgcggcctctggacgaagctcagaaggtggacacgacaatgtcccctgacagccaacgttcgggagcgattcaattcccgtcgcccatcatgcctccccgcaaggaaacactactacgagcagacaagcttgttgaccaacccgaaacccctacccttgctgagaatgcacgaagagactctggtgtatcgatgaccgggcgaggaatcggtctcgaacagaaaggggaggatgccattcacaaacctgatgacgagtctcttatctcgccgataaagctgtctcagacagtcgttgggcagggagcgataacaggatcgtcacgttcacgtcaatctttacagggtgtaatcgttcagcccggtgacgagtccgacgaagaggcccctcgggtatccaagagccatgcattgaggaggatatcgacgggtgccgccgagatttccgagccgatagactacgttaaggatgagactgtttctaagtccagtaccaaacaccgaaggcgtatgattgtggaaaaggaacttcgcgagacctcccgcaacgctctgcaatcccaaagctctgtactaaagcggcatgaagtcaccggtccaaaaactcttggccggctgatcaagctcgcactcaaaagctcgccgaagatgacttgtttggctgtagctgtgacgggagtatatctaattggtattgtctatctgggcaacgaggcggcaaagatggaacagatgacgccttcatctatacgaccggagcgccgccagtctatcgatccttcgaccggctcggacacaagcggctactcgacgtccaccttcgaaaatttcgagcaagacacccgaaacttgatccgtctcaatgcctggcacgcggtctgcgacttggcccttttgctcctgatgcataacatctggaacaacattcccgacccagatggaccgcggacctataagaactggcttgaccgctttggactatggtcggcgttgaggatgctcgtgactttgataccaatgggtgtttacctgctactgggagcccgacagctcacctcgtgcgcttatttgctgaacaatcccgaagccatcgtctggagtataggaccagatgtcggtttgacctgggaataccttgccgagccgtcgaactcggcctctactctgacaaatcctggcactgggagccaagacaatgacggttggcagcttctaggtctttcggtattcttttggtttacgggccttccagtctttctctacagcattaagcgcgtcttgcatccgggatctctcagccggcaaaagattgtcaagaggattgaaaggggacattcgggcattgacaacgtatgatgtcacgcaggcctttgctagttcgatagtttgcaccttgtcgctcggtcaatgtcatgttcaagcgatcgaaaattattgttacaacgcgtcatgttggctttgacgtcaagcctaatatagccacacaagcagtccacaagacatccaggatctccctaccggtcctgctaagtccgcttcctctccattcctcgtaacccgttggcccccacgcagatcggccttcacacagaccgaggcgatctaggccctccaacacgaattcgacaccctgtccgcgtgagtggcagacggcgataacggtggggaatcgggtcccgctcgaatcggctgcgagcacgtcctcctctgcgggctgcgagatgtcgggtccacccgcctgaggtgtcggccagggtgcgagcatcggttcggatcggagatcgtctggactaaccactcttgcgacgattcggaaagagcggaatggcagcggaaccagctgggttgcgggggcatccgtcgcaaaatccgttgcgccaggacgtccgccattcatttgttctctagaacgagctcggcgcagccgttgacccatagaagctcgccttgccgcctctgatgtgcggtcgcccgtcaagtgattcgacgtgaatggcacaaagtagacgagcagagattccggagaagcattgtcgaagaacgaatcgttgcgcagagccggtgtacagctgtacgtctcgaccccctccgagtcggtcgaagctttgcaaagaggaatcaccatggccatggcatcgtcgggaacggcttcccaagctttaccctccttgaaagacatcggggacgtggtctcatccgtaaacgcaattggcggtgtggctgtcccttcgatactagaatccttcggccgaactccgcggtcgtgcgaacccttagaaggacccgatatccaaggcggttgatatctcggctcggtgctggtcccaaccatatgatcgcgtgacagcgaagagatttgacccgacgagccgctgctttgtccgacagaggtccaggcgctgctctggctggatgatccgctccaagaatggctctgctgcttttcacgctgtctctgcttcttctcttctttgcgctccttgcggtcgtccatgaacgagggtgaaccgacgttgaatccggacttccatgtccgcttgatcttgtcaccgatcgataccttgtccttcttttcccgcttcgacccatcggcatgattgccggacaagaggttctgagtcatttgactcaaaccagtggcaggcgccgcttcctgactcttggagctcctcctcgaggacagaaacgcgcccggtcgatcgttgcgtccgcgatttggcatgggtgacgatcgagcgctttcgtcggaaccgtaacgatcgctcaaagccgccagggtggcctgctgtttcggattcgcaacccctggagtctcgtccgagcccgagctagtggtgcggatcgtaggcgcattcggacgcttccgggccatctttacgccgccgagctcgttgtggatagtcttcggcgccagaacgaagacgatggcgctgcccggacagtgaccgaaggctggttcgggaccttcttccggcacgatgggtagattctcgatctcgaattcacgtccaggtcggcgaattactcgccatgtgcggccagtgtgtttggaagtcacgtcgccgctgggcgagatgacgtatcgacccgcccgctgggcttcccactcgaagttgccatcggtagcgggactgaggtcgacacgggaggcgggagaacagaccttgaaggtccattcgtcccgcctgtcgtcgtactcttcatcaaaggcgccaacgaatttcgcaaacgtgtcttcgtcatcgccaccgggcccgagcttcaaggtcgatttggccggagggttctgcgaatccgtcgatgtgcttccataaggcgggatcccgggcgtcgtgggaactgccgcgccggcgaggataaagtcgatgtcaaagtcggagacgtcaacgggtggaggtgggtgtaacgaggccggcaaagggtgaggcatgggttcactagccaagtttttcgattgcagcagatgattcgcgcgatgcagggccagtgttgacggtaacagccgggggccagggtccgataatggcaacaatgggggaagcggacgcgacaaaggagacgttttccggctgtgcgagttgggtccgacgtttccggacgcattaggtggtgtccgtgccagctgtaagacaacccccaagaacatcagctgaagatccagcgcattcgggagtagacgccgactcacttcgttggagctggttgcctcgtccagactttcgcttcgatcagcttcatcctctgtatcgcgatccgcctttttctttctcagtatatcgatcggattactcccacgtcgaccatccgggtacatccttgctaccgtgctcatatatagccttggcgatttggatggactcgattgttgagcattggacggggacatgtcttcgtatcccggtagccccaggctacccctcctgaacccttcattgcctagcaaggtggatgccgactcggtagaatccttcatggccgaggtccgtgtgatggtgaccggtgatcggccgagtatcgtcccatgtgtgctattactaacagatgtaccgctacctcgaggttcccgagcgaaattcgaggtgaggaacgcgatcctctgtctttcggcctcgactgaatcgccgtcactgagtcgagcactggcgacggtcctatttgacggactagacttggatccgttcgagctcgaccgactgagagacctaggtcgactcccactggcaatgggaagagcactcggcgcgccgaatttaaagtcttgtcggattccagctccaaagcttcctggcacgagagcttgaccagtcgaatagttcagaggataatcatcggcctgagacggtacgaccggacctcttcccatcgtctcgatgtctatcgatccatactgcgacaactcgttcgccgtcggttgactcgctcgacgggcaccaagcccagaagcaggaggcttgaacgctcgaacggttccatcccctgcggtcaacggcctgagactactccgtcgtcgttccggtgagatcagtcgtcctccaggtcccgtcgcagtcgaccaggtagcggtcttttttccagcgagcgaaccgctagcggcgatcttggtcgggctaacggtcgccaaggtcggcatggtcggcgacaagctctttcgcctgacaccgagacctcccggcaaggtccacccatccgcactcgccgcatgggacgccctcctgacggacgcctggaccattggtggaggaggcacgggcgagattgtgttgaggttcaacggtgtcaagcttcctcttctagggtgatgcgtatgtatgtacgcagagggatgcaaaatggtgctggctgccggagaaggtggcgccgagttgacctctgatcggttattgtacaggtgtgagtgatctgaatcgtcgacgatgggtggggtagcgatcgacgggtcacccgagtcgcagaatccgttcgatcgcaacgagtctgggaattgaggcacgggcagcgaatgcagccggagcgattgggtgagggatgaccttctgggcaattgtttgggatttgttgagacgtcccggttatccctaaacatcgcgaaatattggaggacaaccaggtagaagttgtcagcgtcactgtttcctcgctttcagccacctgcccgagctagacttacaggtcggcaatttgtcgcggactaaacccagaaatgacgataggctgagttggcagtctcgacttttctaatgtcgtcgtgtccgaggcatcctggttgtgtgttgccattgaatagcgaggatcgatatcaaaagatggctgggcggaaggtggggtatctgcaaggtcgacagcaggtgcgagggggtcgaacggactactggagagatggtcaaaagggaggcaatcgttgtcatagtcagctctgtcgagtacctcagcttgtcacgactcgaccgctgctgaaaagggatcgactcactctgatgcgtccccgtttggccggttgaatgggtcgaccgttccccgctcattcaccagcgagtcacgtttgaggttcctcgaagcctctgacgaaccattctgtagtacgcctgagttctcttcgtggccttgcgttgatccgagtaccggatttgacccgttggcgctaggttgaccttcccgaatcgcggtcgaagtgtcgattgtgggatggatgttgtcttgtctttcggaaccgagctggcctgaccgcgtcgatcgtgttgcgtccgtggacgtcgacggcgatgacccgttcatctttaatgatccgagaccgagatcatggtgtcgattcataccgttctctatcgtatcattgaccttgtgtgtcggggtcgaggtcgaggagacggtcgaaccgatccgatccgggaccatggtggtatgagacccaagtcgcgagggagggaatcgagcgacactatgatgaaaactgaaacggtgtcgtggtcgagctagtaatgttgatggtggctacgatgatgatgctgatgagagtgacgataatgttcatctaggacgttgacgatggttgttgaacggatgagttgtcgtcgaataggaaagggctggctgagtttggcttagatggatttgtgcgacgggagcaagatgccgggagggaggagggaggaggcggagggacgagcgggggttcgaccacgggtgacgcctcgcttcgtttgtatcttctctcttctcgttcaaagaacaacacgactcgcgactagccgcctaccactaatagctaatggctaatacctatgtcgtcgtcgcataggtgcaaggattgaatggtacaagtacgatgcagaaggatatcaatagcttccacatgtagatcgatattgggatgtttgtgtgtcgtcctgtctgaccttcacgtggaaaaaggagcgtgaccgcgggaccgaccgactcgtcgtcacacctcttcccttgcctgcctcatccttgcgctctaacccgtcctaccccgcatgacatccctacgaaaccataaaaaatggtcaaagagagcacacgacgaccacgctcgattgcgaggccgagcttctttaccctccgtgctgctgctggtgtgtaggtggtttgaacacgtatggaacggatgtggctgaaaaaggcgacaacacggcacggacttggaaggggggagggagcaaagaaacggacgtgacgcagcggctccttctcgcttttccatccgtaaaagtcgctaaatcctggtcgtcccctgcactacctcaccgcaagcaaaaaaaaaaaaacccacgacgacgccgaacttgcagctaactacggtactgcgatgatagagcccgcgacactccgtgactgttttccagttgccagactcgtgccgtagcgcgatcagtcaagatcccgttttgatcccctttttcctgcctacctggtcgttcctgcgatccaagttgggatacgcatacacagcaacatgcggcaagtgggtcggcgtctggcctcggatgctgctttccatcatctacttgctctttctcgctcgatacttccggaggaaggacgtctcgcgccgagactttcgcgctcagacccgatcacgaggttttcccttggaacagctgcccgaaggagtggttctcggattctcgggcatacaggtaaaaggggatggccgcagacgggtcggtcaagcgatcgcagtcgtagtggtgaggtcagagacccgcctcatgattcatgctcgtcagcctcgtcgtcgtgggtcgtggctacaaacctgcaatcgaggggtcgaaatgtttcgcgcgcgggaaagatgttccaggtcagggtcaccagggcggagggccacgagagagagttcgacgatcaaggcacggtttgtactgggcttcgcactacccatgccgctcagctgagcggcccagtgagagagcatggaggcatattcacgacgaattcgttcgtgccctgcacgttttgggtaggatccgagatcgaccacgttgggccaactcgcggaggggcaagttgacatttaggattcacttccgttggcgattcacacgcgggctccaggcttgttccctggcttttcacccgcaatcgcctgttcgagcgcagcaaccaggccccggaaaagcaggaaggaaagaagggtgaaaacactcggtcccgatgacaacccggtaacgagaaccttgttcccatctacctgcacgctgcacgtcggtcttcgggcgaaccgcctcagatctgaagagtctcaaagatcgagatggcttgtgattacgaggtctcacggggcggatcaggacgtcagtttagagccacgttatttccacgatgttcacacgtttttttcaatcaaaattatccgactacgagacatgtctgcaaagcgtagacggccaagatgcgtgccacaatcgatccaatcgatgatccatacgacgatgatgaaacgtgcgggaaatagaggagtttacctaccagcccgtactctgtaacctgcatgacttgccgaatattctcccctcttagcctgcaacataatcacatcgacggtgattaccaccggaaatgccaaacgactgccatgctctcgaaagaccccgtaagacggcatcgtaaggctgacgcttaccgatcagctggtacgttaccggtatttcctgcacctgtgatgcaaacaccgttgcgacgtgggggaggtggctcgacggatgacaacaatagcgaccgcagccttctcgaacccaaccggctccgagactgctcccggtcgatcgcataaccattttatgcgttctcgattgggatcttgcgttgtcggcttggtcaggttcaagaggcaccgagtagacgttagaccgttcacacttccgcagagcagtgactcgaagatcaaggaaacgcatatacacttttgctgctaggccttcgtcatgttgactttctctgcacctgctgacatcgttgaagaggggagtctcattgatagtcctgatcatcacctgagcgagtgtggcgggattatgcgttctgacgtcatcatccgagcaatccgggaaagcagaacatgatgaaggaagggcctttctctgggtcttctaaacaattccgccgaaatcgatgaacgcttcatctcctccacgctagagctgtctacacttgacttgtagatcactcgccgaatcaccttagtctttgccgtcacactgtcttcgcttgctatcttcgagcccgtttcgacctactcaatcctgcaccgtacgatcattatcggttctcgccgaaatttaatgacaaaggttcgacatgacagatctcgaaaccgacccgggccgcaagctcaaccagcaacagatctcggactatgctcaactcaccaagagtatctttccggaagaaatcggtgcttctctagccgatgctaatcgagaagctgacggcgaaggatcaggcttggctatcggccaaaccgcgcctcaagacgtcagcagccaggccattcctccgagctccgactttcagcatgagatcgtcgctctcgcccatgatatcatacgtcgagacggtcttgttcttccttcaagacaagctactacgtcagagtactcgtcggagggcttgccggcgaaatatcccgcaattcctatagacaaggaaacggaacacgcgatgatatggcgaacgaccgaatccgcagctgaagcactcgacctcacgggaagcaaggctcgaagagcgatgctccataccccaagcacctatgataatgacctcgaaccgattcttccacctgctcttggtagagaagtgaccgagtggatgaaccgtatcctgatgaatatggtggcagctcgacccggcttcgccaaggatatatcgactggccttggatcttcatcacatgaggacgaacctaagcccagatcaccagcctccgcatcaatgaattggcacgatgtgcttgcagccctgactgtggatggggagtccgcggcggatcgagagtaagtcagagcaccgtcgaacgctttgacgtagattcacacttcgcaattgttgacgatcgctgatgacggtcgaacaacgtaggctgaatagcagaatcgctcatcgggtcaatgcaagacttgcaaccgatgccgagcaacgaatcgatctaaccggtgcagacagtggacctgatcgagaagacttgcagatctgtcagttcagtcggtcgttggattcagccacttctcccatacttataagctgataccgaaacgttccatctgatcatcgtgatgctagccaccctcttgtcccgacaggcggttctggaacagtcgctgaaaagacggcaagccttggaagcatcactttgcgacgaacaagagggctacgataacggcggtgaagtcgctcggaaacgcaacaaaagctccgccaatgtcaagcatgcctgaggagtccatgccggctcgacacacatatctagacagtacagaccggcacgtgtgagctttcaagtccggcgatgagcgcggtatcctcaacggctcgaagattccaggacggagttcggcaatcggcacgaatgaagcaagacgccattcttgaccgtcggagtagccagctgcacgccctcactcgtctatgacgaactacctcgaggctgtcaaaagcactactcggcgatggattgacctgagacctcgcgtctgccgcgtcgcatctccggtcatcgtctttgctcaacgccgatcttcgacaaatgttcgacaaatacacgtataaagcggtcgatgtgcctagggctgaattggaagtgggaatctcctcggtcaggtcgttaccacaagctacaactcagcccatttgtaacgatttcaacatggtctatgacatcgataatttcgctcaagctgatctgaaggaggttctagagctgttgaaccttgatgagaaggtttcacttctcgccgtgagtcgcacggttccggaacttccaggtgcccgctcctaatttttcccattcattcctctcgcccagggggcggattggtggaacactgtacccattcctcgagttggggtcccgtcaatccgatgttccgatggtccggtgagaggttgatccaaatctgtgcagtctagactgcggctgaattgtatttggctttcagaatggagtccgcgggtctagtcattttatgcctacacctgcaaactgcataccctgtgcaactgctctgggctcgacctttgacaccgagttgataaccaagattggaggactcctcgccagggataccaaggcaaaatgcagcagcatgctacttgcacctacttgtaacattcaaaggaatccgcttaatggcagagtgagcttagcctgacgagtgcagccgttcatactggtctcaactgcatccccctttcaggcctttgaaagcttttcggaagaccccttcttgagcggcatgcttgcagctgcatatgtcaatgggctgcaaggctcgggagttggcgctgtcatcaaacatttcggtaagctagcagaccttaggactgggcccgatgtccagaatagaccgctgacttagcttccctaaacacaactagtatgcaatgacatggaacacgagcggttcagcgtgtctatagaggtacccgagaggggtgagtcccatacttcgaacccgaccgtgacacgagcaagctgatggcagattgctctgaatttcagtcaagcgagagatctacctgacgcccttcatgatcgctcaaaagcttgcgaagccatggagctacatgacctcgtactcccgtatcgctgggttacattgtaagtaacgtacgcgccgtgcagaagttggtagccactcaacgcatccggcataggctccgaggatatcaacttgttgcaaacattgttgagagaagagtggggattcgatggactgtaagttatttgacctgaatacaggagactttccactgatgtcgctccgttgcatagggtcatgtcggactggtatgtatgggacaaactcgcctcgcgctgccataacttgattgtacacgaatggatataggttcggctgctattcgagcgaggaagcgctcaaggctgggctggatctggagatgtaagccgctgacacaggttttctcacaccgcctagattcgctcatttggtgacgatgtcttttaggcccggtcctacacggttccgaaaggacctggtcaaggtgttgatcggctctgggaagctttcggaagatactatcgatgcgagagcgtatgcggtactgcaggtgagcgcttttgccggtttctatcgggtcctcgctgtatcaagcctgctaacggaatgcgattgcacaggtcatccaaaggagcatcaccgccgacgttcagactgtaaagaacgcgaacgccaaagttcccgaagctggccgcgatacccccgaggatcgtgctttgaaccgcaaagtcgcgtctgatgctatcgtccttcttaaaaacactgctggagtcctcccccttgatacgaagaagatcaagacgatcgccgttgttgggccaaacgccaagacgcgtaccgtgagcggaggtggtgagtgtttgtagctgggtaaaggctcagatatcagctgaaaatctttacgaacttgattcaggctcggcctatctgaccgcttcgtatatcgtccatcccctcaaggggatccaggacgcactcgagggcaccggcattgaagtccggtacacggctggctgctacggtacgattggcgggtttcgacgtgggaccggaacatcctgctaacgaaaccccaacacagctcatcgtgagctccccatgcttgacggctggatgacggccgaggacggagctccaggctggacggccaggttctcgaataccaagtttgagaaaggtgccaaagacctgctggctacgctagtgcttccttcttcgcgagtcaggattaacgataccaggcctaccggtaagcctagaagcgctatgtccaggtcgtggtggcccttatacactcatatcgtcaattaatttgaactgtgcaggtcttgaagattctttctacatgcgtctctctggctttatcgttgccgaagagactggcgtatttgagtttggtatgtcactggtcgggagggcgaggtgagatttttttattgggtgaggggggcgtgccgacagctctaacgatctaccctctattggtcagattgttcgtcaatgggcaactcgtcatcgacaacggatatgataagaagcagacgtacggaggcacgttctacggagctggtacgatcgaggagaagggagtgtgcgacgtcgaggcgggggagagatatcacatcgaggtcgagttcaccaacttcaagaaccccggcaagaccgccgaggtggcgatcaaacggggccaaccgagcttgatgaccgccgcactacgtctcggaggcacgatgaagatacaagacgaagaacgcgcgattcaggatgccgtggacctcgtcaagtcgtgtgatgccgccatctgcttgaccggatccgatctcgggtgggaaggcgaaggctcggacaggacgcaatttttgttaccgggaaggacaaacgaattggtggagcggctgttggcagtcaagcccgagacgatcatttgcaaccagaccgtaagtttcgatgtagagtggatttggccgacagacctcgcgctaaggcttgctcccgcgctatgccgaccgactggattagggttcagcctttgccatgccctggatcgaccaaacgacgaccgtcctgcaatcctggttcgggggcaacgagacgggcaatgccatcgccgacgtcgtcctgggcaaggtcaacccgagcggacgaatgccattgtcgtttcctcatcaaattgaggactgcacgggatttctcaactggcaggcagagaacggcaaggtgtactacggggagggttagtttcaacgatcgaggttgtgtcgaccgttagtgcagtatctgacgagaggttcgatcgccaggcctcttcgtcggttatcgagggtacgaggcgacgaaacgggacaccatgtttgcgttcggtgaagggcaatcgtacacgacgttcggtgagtggacacgatgtgtgagagtgactctgagaacagcttgctaaactcctcgacgacgtcccttatccagaatggtcaaacgctagggcgaagatcgactctgccgaccgggccgaagacattgccgcgaccgtcaccatcaccgtcaagaacactggcaagacggccggggcggatgtcgtccaggtgtatgtgcacgaccgggagagctcgttgagacggccttacaaggagctcaaggggttcgccaagatctacttggagcctggcgagtcgcgcgaggtggaggtcgggttggacaagtttgcgttctcgtactatgatgatggacagaaatgctgggtcgccgaggagggcgtgtttgatcgtgagtcaggggagtcggtagtcccgccgctatgggtcttcgaggctaatcaacaacgtggacgtgccagtgatcgttgcccgatcgtgccgagcgagggatgtggtggatacgctcgatgtcactttgaataagacggttcgatggacgggtgtctgagctgcgtgcatccaagggcttgtcaggaaaggcgggaaccaatgaagctcgttgtaccatagaaatgagagggaagtccaacatgaagatgactcaagctgtgcttctcgagggtgtcttgcccgctgcaatccgtggtcttctcgccgcacatcaggtctgtggttcgactttggcttctcgaacgcgtcacgtgtgagtagcgcgtactcgtagaaagtggatcaaccttgattttgatggcaaatcgttcatcattccttcaattcagtactccctcgcatctctcgtgctcctgcgcctttctcaactttggatttgttttattcctcaaaccacgatcggcacggaaatcgctgagaagctgagaagctcgtttcgtaaggaaatcacgatcgatacgatgttctttacgctccttctcccctcttgatcgcatcacaacgagtttgttgtaagtcgtatcgtatcactcgcgatcactctatcaccttcgaaccgccatctcttccatcgatctatcaatcaaagattcttcaacgagtctacaagccataagccggtacgattcttcgtaagacctttcatacgaaccttactaattactaacgggacctcaccttcacaacgttcatcagcttcttcacttcttcgccgacgtccacccggtcgaacaacttcaacacttgctagcgttgctagatctcgtaggtggcgaacatcgcaggacagattcgaactacacgactgattccttttgctctccctttatctcaatcatcatcagacgacgtccaggcgttacggagacattacgagcgaacgatcgatagacacagaaccatagagattttcgacgaatacattctgacaacgaccgagaagcaaggggtctcggatcagaagaaggttcatacagggcagaatggtcagtaccttcttccatcatgtcaacactaaaccaacctccctcgctttcgacctttctgaccttccttgcttcttctcgcagactctctgatcccttccttccttcccgtccctcgaccccgccccaacaatggactcgttaacctgggacaccgcagctcatcctcaaccgatcttcccgcctggcaccatcttccggtttcgagacatcaacctactctgccgtaatccaccctccaccgactccgacggccaagtcgacggtggggctggaccacggagatactggaaggtagtcggcgaattaggacacggccaggtgcgagtctacaaagttatcgccgtcgacgcagaggacgtcgaccccaatgtcaggaccgccgaagcgaccacgacgggagacgagatcgccacggaagacccgtccgccgaggtcgagaagacgacgagtccgaccggcacgatcgtcaaggacaagggaaagggcagagctaccgagatcgtcgagaagaggaagagaacgatcacctccgagagcgaacagggtgagttcggatagaggttctcacttccatctcgtatccctggattgacgaagcgaccttgtgattagccgctgagcttgacgaagcaagaaccgagcccacctcgcaccctccccttccttgccccgccgcatcatcagctggcccggcaacctcgacccacagcttgaaaggtgagtgcgagtcgatgggtcatagctaacctacattgccgttagactgatcgtttctcgtcgtcgctaccagcgtccgcggacctccgcgatgaagagacccctctcattccgacagtctcgccttctaccgctcctgccgcatcgtccgcgtccaccatcatccgaggggaacgaggccgtttcgccaagaagaagaaggtcatcgtgaccacccccaccaccaccaccatcgcttccgccacggcgccgttcttcaccccgaccgcgaccgttgccgctaccgccaccgccccatctcccgtccccaccaccgctggtcgatccaccatccccgtccctaccgctgctgtcccttccccctccatcgctcgcgccatcaaggttcaatacacctcggcctcaaagtttcaaaagaaccccacgatgagctttgaccaagagtacagcatgctatgcagtgcttctggagtgcctgaggtcgaacttgcgggatggatggaggttctgttgccaggggaatctctctggacagtaggaatcatcgcagggatgatcatggtaagtactcgtactcgtagaatccgcgctacactgttccaaactgatttccttctacgatcagcctatctacgggcaatttgccgaagtggtactggacaaccctcggcactgggttcaagctctacagaccctcttccacttccaccagagctcaagacatgtccacggtgatatcaaacctggcaatcttctggctaaacaccttgacggtgctgatggtgaagtggaagtggtgatctcagacttggaaggagcccaacccattggatcaccagtcacctctgtgctctcaacaatgggatacatgcctctcagtattcttaccaaatacttggaggaacgtaagcaagccggcgtcgcaaaccgcttgttgcgttcagtatcccccattgtttgggacacagcggtggactactggtcttttggtgtaatggcacttaaaaagttttgccccatttacaccagaagtgaattcagggttgtcgaggtagttgcagaagtcaaggaagccatgaagaaaggccctgacgcagcacttcaggctctcgatcgtcttcgggagatatacgcgtaagttcgtggtttcggggttcgagttgtctcgatggtttcgggcttcgggttatctcgatggtttcgagttattcaaaactgattacaatatcgatatacagcgacgtgtacgacgcccgatcgtacgagttggagcttagcgatcaggttcaaattcgggacctgttacgattctgcctgcagagacccgccaactgcagtcttatcggtcgtacggtagaaaggtcttcagatatcagcgcactgctgtccgagctagaactcattccgactacaattccagctgagggtggagcgacggcaagttcctcggcgatgaaaaaagcttccagcaagcccacgaaggaacaagggtcgaccgggatcgtcgcgacgagggggcgtgcggctgcaatcttcgtgaggacggatccgccgcgttgcccagcggctcttccttggggccgctgtgagatggctcagaacgatcgcgtctatggtgagttcacatacgatgaccttggtcgaaatacgcagttgacgacttccccttgtctctagtcatcaaagtgccgggtcagctcaacgatcgcgtcaagacgcatgtattccagccatgttcaggttctcacgccatcgggtaccggacgcctcttactccagcctccatcgattccatttacgcgtgtggtaaccgcgatcccaagtacgcaacttacggctggtcctgtatggttgcacacactcggaaatgtcttggagacgactgggattgcgaaaagtcgagcgttgtaatgaaatagtgacgatatgacgatacgacgatacgacttttcgagaagctatcggtccaagcgtaataatgcggtcgcgcaggtttggttccgaatggcaatggcggaaccaaaatcagcgtgcaagtccaggcaataaaacgcaccgatctcttgtttactcccaaaccacacggtcaaagttcctcctactctataggatgccttatgagaggtattccaacattctgaccgtctgagaacaaaaaaaaatcggcctggatcccgagataaattctgcatctcgagaaccgatcgtattaatttggttctcagacggtccgattatgattcctctcactctggggactttctgagtggcagtgtcggcccaatgtggcgtttggtcgtgataggatatcgcgaaaaaaacaccatgtttcggtttactcggagttagagccgtgagcgcgttaagccgtccagatcgtcctatagcgattgcatgggcatgagctcggcatatgtcgtactcggccgtactatctaacgtctcgtgtacttactggtgatctcctatcaatacaggactgtgcggtatcttttccggaaatgagcgagtatttttgagtcgtcagctgggacgctgcatggcgaactctacaagcgacttacgaagtataaattaggctcgaatcctagccaagagccatacgctcgctttggccgagccgaaaaaggacctcaccgaggtcgttgacgcggcgtcgagcgatatgtccaaatttcgtcgagacctatgtacaaaccggatgaaatcgtcgcctcgagcgggagctcgctttcgcttccgaccaccagccaagcgcggtggacttgggcgtatgcgtcgacaataccatcgaccgtgaatcgaccatagacttggtcctgcaggattgtcagtaggaactgctctcacctgtctatgattctcggcatgtgtcctctccgacatgcagaatgcaatgaaggtttgaatgaggaagcggatcgtctatgcgcgctcgcgctcagatgaagcttccgctccactccgttgtgaggctcgacgcgccggggggggggaggatatgtaggaagcagcgggaagggcagggttaatctttgagcgttgtgcagaaagaccattgcgcatcctcctcgattcgacccgatccaattgcggttcatcaatcatccagtcgacttgcataaatcttggttgtcatgtgctccctcctcacccatccgtacacgcgtacctcggaacccattcgcgtagatccaaatcctgtgtcgcccgactctaaatggccaagacctgagaatcctcatcgctcggctctcaacgacgtcatccgcgaaccagaaagggaccgtgtaccagagcgtcccgatcaacgattcttccgatgcatccgctcccggctcgaccaagaaaagcgatcacgcggaaacgtcaagagtatcctttcgtggaccacctcccctgacggtccaaacgttatcgccggtgttcatccagtcgctagtcacggtgtaccaggtcactgccaggataatcttcgctccgtctcgttcgcccgcttgtcgacctggaatatcccttgcatcgtctgactctacccgaatccagaatccagaccccaacctgggcggcgtctgcgccgcaaatgaacgacctggcgtgtatccagtctcgatccgacctcgccttgctttgccagacgcgttccaagattgatccaggcgaaaccgcgatcgacaacgtctcgcgtcccctttacccaagcgtggagtccagactcccaacggcgtagaaccgcgaatcatggtattaaatgttgtacatagtcaagcctgtcctcagaaaggtcttccccgcgatcccggcatcccggctcccaacggctacgaccgcgaacccgcccccccaggacaacgtccgcttcccccgtcctttactttcgtttcatctgactcctccttccctcacccttcttgggcggacctcgaccttcgatcttcctgaccctgacttcctccctcctcgtcctctcgtgtgcatcggccatccaggcaaacgtgccgtacgaagcgggaccttcgcccttgttgctcgagacttgaccgagcgaggcaccggctggaccgtgaccgacgggttcgaagccctcggggacgtcgccgcgggccgcagaggacgctcggtagtccttgatggcagagtagagggtgttggggtcgatctgattggtctcgcctggtgcggcgccggggacggtcgaagggtggtaaggagaaggacgaccggccgggtgaaagtctgggtttcgtagcaggttggaaacttgtccgaatagaggttccggcttgccggcttgacgtgatttgactgcggcgggtaacaaggaactgctttggattccaccttcggggaggttgactttgcctccctttggttcgcccttgcgattgagtaacggtgttcccgcgctggcggcgacgattcgttcacgttcccgttctgcccagtatgatggcatgacgtatccgaccatggaaggtcctcgtaaccgtttcttgaggtactttgcgcctgtcctcaagttttgcgggttgtgagaggtttgaaagatttgtgatcgaacgaggtggatggccgctgttgccgtgggcagttttgatgacgaggcgatggaggaagccatcgtgagagttctagattgaggtcagggggtgtcaaggtggtgttgggtatgcaaggatgtcagtcatggtcgtcgtaatttcacgaatctgattctctcgcttttgatgatctctcaacctgggtcgggtcacccacccaagttgcagggtcggggtcacgctcagccagcccagcccagcccagcccagcccagcctagcctagcctagcctacgagggtaatcgaagactggttggtatccgcggtacaagaagcaagatcagatgtatgcgcttgggtgggcgtgtgcaagtggttggttggctggttgcgcttctacgtttgtcacatctgcgcgccctcgctcacacttttccttgcctgcctgccttccctctcggcagagagcaagcgagcgagcgagcgaccaccgccgtaccatatcgatatcatcaactttgcaagacaatcaatcacaaacacccccccccgcaccccgcaccctaccccccccccccccccccccccccctttgaaacacgcccgaagctgatacctcttgccaaaccctggcctcaccccgaacttacagggacaatcactggccgacctcgaacgcacgctccagtccacgggcaagaacctcaagaaccctcctcttcgtgccaacgagggtgaagccacgctctatggagtctattacgatgataccgagtacgactatatgcaacatctccgtgggctcgatgtcgacgaacaagccgaagctgggggtagggctcagatggcggacgaggcgatcttcgtccccgccccagggagggggagtaccggggtaggcaaccgaggtgcagcggggaggacgacggttcaaaaggacgacagggacgatttcgcccgtgggttcttcaaaaagggtcaagataccccatcattaccctcttcctccctttaccctcaacaacccggcggtccgtccacgtcgacgtccacactaccctcgaccgtcctcccatcgacacaagagaggtcttatcaacaagccatcgaagccacccgttccatccctacccaactgtccgggtttcaaccggatatggacccccatcttcgtcaagtcctcgaagcgctcgaagatgacgcgtttgtcgatttcgacgaggacgacgacgaggtcgaggtcgaggtcgtcgacatggccagtatgcgcgcgggtgcgggtgataaacggggagctgggaaaaaggactggttcgacgagttgctcgggggtggacaacgaggcgaggacgagcccgatctggaggaagagtttgaattccgggaagaagggatcgaggatgacggtcgaccgagttggatcgatcctgcgcttcgatcgtcgtcgacaacctcggcaggtcaagagggcgacgagggtggcgacgacgtcgaagaacagacgtggcaagatcgattccgcgcgttcaaggcttccggaggactcgcacgacccatctcaccgcccgtactccaccctgaagaacgcgacaacgacgaggacgagggtgacgaagcccaatccgaacgggccgacacgctggcctcgatgcggtcctttgcgccgacggtgaacggggccaagaatcgtcgtcgaaagggcggatcgagggcgggcgggagtcaggcgagtgggtatagtatgagcagttcgagcatgttcaggaacaaggggttgaccgtcctcgatgagcggttcgacaaggtaagttcatcgccccgccagtcggacattgcgggtaaaggcaaagaaaaagacattgacctccaaggcacacgctcacgatgatgcagatcgaacgggattacgaagacgagggggactttgacgaggatgatttccccgagtcggaatggatgtcggaagccggcgtcgagggcgaggacgacgacaacgcctcggtcgcctcgttcgctacggccacgacgtttacgcggatgttgcgtaaacagcagaaacagcgagccgaggcgggcgagaccgaggtctctcgagaagatttcgaggcgatcatggacgatttcctcgataattacgaggtcgtcgggaaaaagatggttcaggtcttgcctgggcacagtggggcggaaaagctggatagcatgaggagggcgctcgtcgggctcgatctcgaggggaacggagctgtcggcgctcagggtcagggacaggctggtgacgaggacgagatgggtagcttggccgggggcaccaagagggaggcggattacattcgacaacggtatttgagggaggactactacgccggaagaaagggggaagaggaaaagatgcccatgttacacattgtcgggcagggcaaagaggacaagtgggatgcagagaccatcttgagtgagtctcgacgcaccaccggtcgatcgatcgttggccggaggtcgatgctaatgacgaggcatgggcatctttttgctctgtcgacaggtacatattccaacttggagaaccacccccgtatgatcggggtagcgcgcaaggaaaagaagaaacccaccgttgcggccgcacccgcatctgtacccgacctggacgaagaggccgaaccttccctcgaggacatggcgcggagcaatcacggggacgatggggattccgacgacgagagcgtgtcgagcgatggtacggtccgtgcggaaccccgagcgcctcccgttcgaccccgtggcgagaccaaggaggacaagaaggcgaggaaactcgccgtcaaagccgagaggagtgccaggcgggtggaaaagaagacgagacaggagacgtttggacttgaacgcaagacccagttgaagggtcacgaacgagccgtcgggtcgggtcgagcgtctgatctgacggcgctggccagtgggggtacggggaccatcaacgtcgtcaggttatgagcgaggtggtcgtgttagttgttgatgtctcttgtatgactcgccatcagcctggctttgaggtgtataggtattgaccaatggtatatacctcttgagacaaagttgctgctgcggaataaccctctcggatagccgtggctagctgtgtcaatttcgtgagttctttccatctttgcttccgtcgccgcgatcgaacacaggtcccgggggggagtggagctgcgtacgtacgacgagtatcgtttggtatcattattgaaatgtacatgcgtaaactactatacacaatgtcaatgacacacactgcatactctatccttatacccagatagtacacctagccaatcgtccataatgtctgccaaagatgtgagtctcgatctcgaatatccactcggagagcgagccagaaccgcagagaatcgccagaggtggtcgtgctattcttggaggagaagaaaatgaacatacaggcatatcgaacaagtcgaggaggaaaggagaaggaactcttattgccaaggtggcgaaaggatgctgggacgacaggatggaggtggatccgaccatcctcggacgtaaagcaagccccatgccgaatcccgaccggcatgaaaccacttgctgcgcgaagcctggcccgcgactccttccaaacccgccgacactctactgacctcgctctgaaactcctcgtgttcccgatctcaatagtactaccaaaaccaacccgagcgcggtttcggcggagctcctcaacaggggaacaactactatgcccctccccaggggcaacaaccgggctacggcggtggttacggcgcaccccagggtcagatggggtacggcggtcagcagcaacagccgtacggaggacagcaatacgggggtggtcagggtggatatggcatgcaacagggatacggaggacctccccagggttatcctcagcagcaacagcctgtaagttgtcacccctggttccccgcatacatatggttcctttcagcgatgtcccgtagcactccctgctcactctcttgctcgttctcctcacgtcgactataggtctacgtgcaacctcctccccgcaagtccggagctggagctaccggctgcctagcctgtctggccggagtgagtcatgcttcatcaaccgagcatctctgcctgttcgcgccaatcgactgatcctctgccttcccacttccccctctccgttcctggtgataatcgactgacaggcttgttgttgttgtgcggccgaagagtgagtcatgcaagagccgaacgatgtgtaaagcaattgggggatcgaaggctgatgtttcgtcaccgttaggatgtgctgtgactgctttttctaaacgcctcctaatcccattcccaccgggtcttgactctgaccttgcgatttcgtgccgagccacaacacttcgacctttttcctctctttgaaaccccccattaatttccttgtcaccggctcgatcgcaacctcgtttttctatttcgacgtcgcaagcgctcgatcatccacggtcgcctgtatgatagcaattgatcgatatcattcccgttctgttgacatcttgccggctgatttgacgacaccctgctctcgtcaacgcttcagtccaggacgagaaacgccgcgttactgcttcgcaccccctgatggatggatcgtcggttcgcatcgtaatgtcattatacaatcatgcatcactgcgatgatcatcatgatcgcagtcgctattcgtcaaaaaaaaatcacgttcataacagatcacaggccaaaggccggagaatagggtcgaaagccagaactaggtggccccgcgctgggcaggccgttgttgttgacgccggcagacactggcttgagggtcgagacctggagcaggatcccgcattctctcgtcttgctcgtcagtttggctagcagcgcccttacgctgataggcagtggccgttctttgctgacgaggatggcgagctcggacacctttacgacggctttaataaagctctgggcattgtaaggcaggcggacctcggcgatcccagggactggtccggaaccgtaagcataactaccggaatgagctcctgccctcacttccataagcgattcgtgcaagtgtcgtgtagtctcctcggccatcgctatccgggccagcaactcgatgacgcgttcggatcgcggcagcgaggaggcttgaccgtgactcggtgattgagaagtggacatgttgagtttcgctagccccagacggccgggagtcgaagcctgctcgtgcggatcgcgcagttcttccgagagtcgaagccagacggtatacgcaatgtcagaagcctgttctagcgtgtccaatactccctcgtcgaccacagtggctgcgctacgtggcgtaggggggtttccatcgagatgaccttccctgcgtaggtgactgcgaatggccccgaacgatttcatcgatccacctgaagaggacggcccgtgtctcgcaaagctgccttctcgcgacgagtttttgatcggaggcatggataccgatgcctcatcctgctcgtcctcttcatccgcctcgagaatcacctgacttgcagtggattcctgccgcagatgcgatgccttgcgggggatcattggcatgttctgggaattcgagtcggacgagggagctgacggatgtccatctgggcccagcatcatgcccgtttgcacgtcttcggccgaaaaggatccagcgtgacgcctggatttctctcgaccattgcccatttggcggataggcgagccttttgcgacgaggtctatcgtcgctgtgacgggagacattgcgagttgcgccttgacggcgtgcgccgaaggcgattgagactctcctcgttctggaattggcgagattggcgttctgagcgagctgctgtaggaagcccctggccggtgtcgaccttccctgctggtctcgcgcagcaaaggtctgatctcactcaggagaggaccgagagcttgccaggaggcgacaatctcaccaaacgagccgtagaccatgaggaacatggtcttggtgtaccgcaaatcagccgatgacctcaatgctgctacctgcaacttcaaaacccccatgacttttgcaaagacagcgatgctgtcacgacagctctcgacgaccaggcgaatggtggaagcgggcggtgtccggcgtcgggagacgaggtcgaaccgatcgagggcactaatgagatcgttcaggtaacccgcggccggatccaggaccctcgcaaagacgctcgctacccggtcgtccgcagcaaaagtcaagtattgctgcagcgatgtgtgaatctgggacatggcgaacaaaaggccccggatcgaatcgatactcgctagcagagccgcaggtatcgctttggatacgctggaggaaggcagggtagagagtcgtttgaaatacgagttgcgcgagtcgtcgacactgcgctcctcggagattggatctttggctgcagaagcctttttgggggtctcttctagcagcagagcgtggttgtcttcgggcactcggtcgccagtcatgacgatgggcttctgtggcgtcttcgccaagtctcccgcctgactgagtggatcgatgctgacggctcgagtcggagtcaacgaatctcgattggactccatttcgatagatcgtcgatccgccagaatctgagcgtgactcaaccgcaagtcgggcaacgactttttggtcgaaaggttggtacttgatcgttgcgaagcggtgtagctagatccacgggcatgaccggggccgttcctaccatctctgagagtagagctgctagagacattacgagccagagtgactagaccttccgctctagaatccatcgagactggagacattgacggagacggatcgtcgcttgagatcggctggccgttcgaatccttttctgaccgcgccgtgttggctcgccgtctttttgtggaaccgagatgaggttccgagcggaatgcaagtgggggcgaaagcggtccgttgattgagccccccgagtcgtttgactcggtcctgctcatcagccagggcaaggacgaatgttcaccttcatcggaaatggatgacaaggactgcttggctcgcgaatgctgaatcgatggggatgaaggaacggccgtctccctacagaccggtcctctgggttagagtcgctgtatcagcccgtcagccgcttaaactcactctatgtttcgcaaactctcagccatgagtctgacttgttcctgctcgtgcgtcctcatccaatctttgattgaggcgatccacagctgatcatcctttttgtgaatggtactgtccgtactacctttggagcctccgcgcaaatcgatcggctctggcttgtattccaaaacttcgggaggctataggtacgaaagtctggggttagcccgaggtgaaaccacgacgatttcccccttgaagtttctgactcacaggccactctataggattgttatcgacgaccagtaccttgagatttgcaaagtgtactaggtaaccaggcagcttgcgcaatttgttgtgtgacaacgccatgaccttttcggcgcggaatgatcttagactcttcgctcgcccatagccgagccgatcgtatgctcactctcaactgcaccaatctccctggatcgtcgggcagagttaccaagtcgttcttgctcacgtcgaggatctccaaagagggaagctccaaaagctaacgtagatcacagtcatgtcagtatcgcgttcggaatgctgaggagagctgggtactcacaacctgagggatagtgaccagcttgttacccttgagattcaggtagcggagtcgagtgagcgtgttgaatgaagcatcaaacgatttcgctgtcaagcggttataagagagggccagtctgatattgcagcgtccgaatcagcgatagtacctggcagtctagtccggaactgtatacttgccgccacacgccgagtcggtctttgccaactgccgtgcgaagcatgatcacgtcttccgcttcaatggcagtgatccgtcgtctgctcagatctagcgtgtctccaccgtccttactgtgctctgattcggcgatgatatgctttgcaatgcccatgatcggagctggagagctccccgagctcgtggaagacttttgatgtcggtgctcgggggtctgggcatgatgactctgctcagacctgatattgtcaggatgaccattgactgcccttcgagggtggtcgtcacggctcgtcgatcggtggtgtgcatcctccggcatggtccgcataacattgacgtccatagatcctgatcgactcatgtagtctttgcctggcgagtcgacgatgcggagggaagctggaggcacccatgcacccgacgaataagagtgattgtgttgttgctgggatggaacaccctgccaggcctctcgtctgggtggaacctcgggaggatgataaagctcccccggtagagtgcctcgattgaaaggccccacagagcttataggtacaggtgaggaacccctagaaagggaagcgaccgtgttgctcctgctccggctcgcgagatcatgtgggagcctcaacgaccctgtcgatgacgaggcttgaggaacgaatccagagtagggatggggcggaagaggtgacatggacgccatgttgacgtatccagcggcccagcggccagcgtctaacggctcctgttcgttgagcgacttttacgactcgagtcgccgaaagatgagcacgaacagcaacgactactgatcgagcagagctaacgcgatgacatttgggatgaagctgaaaggcgcagtcttgctagtctggtcaaggatgcttgccaaagaccaactgattagaggcacctgctggtcctcctatcgtcgggatggaaggatgtcgttgtcaggcgaggatcgatgtgatgatcgcgggatcacgaggagcatcgaatcgtaacagcgacttctaactttggcacgcgagaagctgggtcattgcttggcagtcaaccccgcgagttgcgcgagttgagcatattcggtcccgttcatcggtgccacgattttaggtcaatctgccatgcggccgacgtcatacaatggattgaaagcagccgattatacaggtgacatgatttttcgttaatggtcgtaaaaggtttcaatctcggagctgatgctatgctgttgagagggtatgacgttggcacggcgacataggcgagtctttgacgatgaaaccaagctcacctagatggcaatgaaatcgccagagcttccgtcctgttgggaatcctgcacttcctctacgtcgacttgagccgccaaccgccggctcgctcgtcctctgttgtcgccctgagtcgcaacttcatcttcgctctcttcttcattcgcactgacaccggaatcctccgagtccgcattgccattcctggccgagctttgccgctttttgcctcgccaagattctgcgaccctgttgtcatcttctaccggtacggcgtcttctccgaccggcgtcatctccagaccgtcctcctggtgaatgtcgaaaggagtctgacatgccggacatttcggttgtttcgccgaggtcagtttggctttgcaacggtggtggatgtgcgctccacctggtgtacatcaggccggaatgaaaggtgacgttagaggccaacgttggttgtgggagttatcgttctctccccttacattccggctgcgcgcatttccacccctgtaaagtgagatcgaggggttcgttcagttcaagtcaaagtctcgatctcacacgcaggtctacttgcgacgaaaaccaaatccttgcaagaagccgttttcctcttgttgaacgaacacgcgttcaggacggtttcaccttgcgtcgcatcggggtcgccatacgtcgtccgtaaccacagatctagctcaaggatcgcacgtacgcctagcgagtatcgtccgcggctgtcaaggtcggcggtcctcggatgatcagcgttggggcgacattcgaggaaagtttctggtctcgacactcacctcgatttgtcgagccagccacgagatactagagcctggagaagcgattccgcgatgctcttctgcatagcagctggaaagcaatcgaatgaaaggtgaggcctcgacttgggaacctcgctgcgagtcggctcactttccaacttggccgcgatctgaagtgcttgttttgagccgatcgagttggctggatacgagtcgacgacttgcaagacctgtagtcgaatgccggacggaccgttttgatgatttagacgagcagtggtggtcacggtcgtactgattacttgcgatctgccggtagaagctgatttctagaggcgtaaagtctgagacggctgccgacaaatcgtttgcgttgtccaaagatctcgtgtttacctgcgagtatgcgaaaacctgtcagcattgccagctgcttccaggacaagggttgagcgatcatggcgaggttgctactgacaaggcatatccaatgacgtccggtatcaccctgctctgctgagcgcatgatgtccaggtcaaagtcccgtactcccgaggacaattcctgcaaaatctctttgagacgtttctcggggtgtgcagaggacagttcacgccctgtttcgagagggtcgatcgatcaaccacggtcccggtagccataacaaatttctgacctttgacagctgcataggctcttttatataattcaagggcgacttcctcgggaacagcccgacgtgacatcagcgcctggagtaggaccctgtgaaggtccgtgaaaggagccatgacgggcaggtatatgccctgtactagatatgaatccagctatcaagagtcacagcgatcgaagttagagaatcagagaccacgtcaaaaggatgtagctgccgagactttatcagcacgatgttggagttcgcggtggtaggtggatcaatcgatcaacctgagggcgaaagtgcaccggaagcttttcgatggaagagcttccggcgcaatcgttcttgttcaaaagtgggtggacttgcggacagatgtccgagtcgcttcgatgctatgtatgtagaggtcactctgacaataacgtacaggtcaccatgatactgaggagatcgctaagggccctcgcctccggcggttgacaccgcaaataccgcccgaggatcgctgtatccacggacgtgctcgaatcaagcaggaaaagtgtttgccaaaaatcgcaaaaatataagcccgcctggggctcgaacccagaatctcgacctcatattcaatagaaataggaaagtcacgccttaccattgggccaacgggccgcacttttgacagctccacccactgtcaagcacgagaacaccattcactctcagaccaggccaattccaaatctgcgcccatgtcggacctcaacctacgcctaccatcgggccaacgggccccacttttgacagccacacccactgtcaaccacgacaacaccattcactctcagaccaggccaattccaaatctgcgcggctgcgccgccgctgcggcttcgccgcctttggttttctctcccggctgccttctcttgacgctttgactctacttgcctttgctacccccagctcgtaaaacctgtagcttctgcgccaagcacggtccggcacctcaacgccctcgccgaagcaagtcgcccacgcgggcgcctatgatgtgcatttgccgacaggtatccactcgtaacagggtctactagtaccggcgttctcgacgacgttcgtgccagcgtctccgggtggtcaaacgacctggctgccagttttcttgtcatccggcgccttgccattcctcgtgagactcggcggcttgaagcaccttagcagcctctcgacgtccctcttgtgctcccctcgccagtgtggcgcctcggctatcaaggcgagacaaaagctcaacaactgagcacgacctcgtctgtcgggcaatctagcacacagatccgcaattgtgtcaggaaattgttcacatctttccgattgaccaatgcggcagcagccgttatatgaacaacgcaggaggtcaatgccgggaatcgctctagcgagtatcagagcaagaccaaaaaaaaaacctcgtccagcctgcttgccatgggcagagatcttgccacccacaacagaatggccggacggattgattgatacggatcttgacgttcgggctcagacaagcgcgcttacgagattgggtcacatgttgacgagtgatcgattgcattggtgtccgtgccacttggacatgcacttcgcgctcgtcgatgacggtatactgccgtaaacggtggagctggcatttggagagcatattttaatcgcggacaaggacaggtgacgggatggtatggacaaatcggtgcctcagatcgagtagcagaatggccggaacctatcgccgccgagatggctcgacatggagacagaatgctcgacatagactgctcgggcatagtcgatggacagataaagcgtgcgatccgacccttttattgactatcacgagtactcgtgcaattaccgcctggtgttctcgtcagtgggtgagggaaaaggacgaccggtggacccgggggccaatcacttgcacccggaccaaggtctgcggcccgcctcgtcccaagtccatccatcgcatgggccggcaaggtaacggtagacatctcaatgtaatatcggatgtaaaactagtatagggcactagataacaacagacatccggaaacacccccgctggagactagaggttgcggcgtgtgtctccggcgagtcacgcgatggctataccagaagcaaccgactttgtccctgtggctcctatcgagtacacatcctcctccttttggccacggggagtcgtctgcatggtccgcccgacatgcaaggagaagattcgggtcaacctgctgccttgtcggagcaacttgagctctcaagcgatttgataccgtgacgcacgctccaccccaatccattcgacacaagaccaatccgaaacccgcgcctcactgagcatctctctcgcttcagcttaccgtgattgcaataatgtctatcgtctggtggaccacttttaaggggggcatttcaacggggagctccaaccggagaactgtccggagtggtctatcattgctcgactgcgatcgatgctcgatcacgagctggctagggttgattctgggtgcgaaggcgcagacaaaggcaaggtttactactgcacaaagacatgcaaagcaagagattactgatatagcatcgctagaatacaggtgcctctcgcaggaacatccatgcctcttgtttcctgacccatcgcgcgactgcattggcagcggcaacagcagagtttttagggaggtgtggttcgaccgccacatagagctcgaaatgtgaagttatctgccgaagcagcagaggacggggggtcagaaaccgctttctctctaccatgtcagacaaagcgtggttctcacccagcccaagcacgcgtcggcttcggttcgaacgaacgcttgacgcataggctctgcttgtcctgatcgtgcgtgtattccatcgtagagtcgctggtaggatgtgatcagcctgcgcgagccatgcgcgatatttcagcttcgagtcggtgtagaagcacgaggctccgtccgggcttaccgtcgtctcgctagattgggctcatcataaggggcttcccatacgggcatggtcacctgcacgttttgacgcgacttgtaccagaaatgacgcagccctggatatcctggttcgactagcggggcgtgagaggatgtcatcggcctggtccctgcatacgacattgactgaatactgcttaccagagaggtaagggtccgccaacccggcaagttcgagcttgttgattatgttgtcctcttcaagcttctgttcgtcgagagggattaagcatctcaaccgcgtttgaagcagacgacgcaagctgaccttgatgacgcttagcttccacgtctgaagcgcctcgaacccttcccgatccgcgctgacaaatatcaaaccgatgttctccttgacatagtcgatcagcgcgtagacgaatccgttcgggttgaatttgggcaggcagagcggtaaccacgtttctgaggacttgagccctggcgatgacttgaggacgttcatcagcaagtgaagatctaggacgagtagataatgtcaacccgacgttgatgagcgatcccccgagcaatctagcctgttcaccaacctgtcgggtgtatcgagtgcttccgcggccgcaaaagcgtcaccactttgtcgttgaccagcaacaagacgtacaacaggtcctatgatgagacagctcttcagcgctagccccctttcgacgcaagacggacggtcatcctcacattgatcttggccggcggtgacaaagcctgacccgcggcatccctcaacgcgggagccatcctcatgggttgcagagctgacgtcatgaacgtcaggtccatttgcatgtcctctagtaatgaatgcgacgagctctccgtgcctgcgctttacgatggactgtcagaacgagtatggcggtcgccttgggaacgtctgcaagacatggaacccaccttcgagcaaccgtcggaggtcaaagttgctttgtcgctgaaacaccttcttgagctgaacctcggtgacgaccgagagcaactgtaagtgcaagtgttcgaggtgtgttctgagctacatattccgagaggaacctctgattagcactttttctgccatactctcatcccgtcgatactggactggacgactcacgacgaaatcgggttctccccagtcggatgtacagaagagaaagacaggcgctcggagcaaaaacgcgattttgtgcctgccctttcttatcgacctgtagcgtgcgtctcaaaccgcatccgacagtgagaacaaggtcggcagggaaatctaaactacccgggctcaccgtaaggtgtcccccgattcggcatagatcgagatgatggcttgaatcacgcccatcatattggtcgtctcatcaccctccgcttcgagtctaccgagaggaacgccagtccatgggtcatacgtcgcctatagatattcagtcttggcgatcgtagcgacttacgagtcgaacaccggtttccctgcatgagtgaggatgtaataccggcgcggtgaatagccatctatgttgccgaatcgatgcaaagcttgtcaacagtcggtttttgcacacattgagacaacgcagagattcacccttggtttccttccctttccccttgtctacgacgatcggggagacgaccggagtcggaaccggttgcgtttccctgctgatcaacctcttcaaccctatcctcacgtcctctagacctgatccccccgttccatgttgcccgggcacgaccgaactagctatccgagaaggtgacgaggatgacgatccagacgaactccttcccgcagaatcacgggatgagcgccgttccctcgagcccgacctgctcgtcctggccgaaccggacgtccgctggatcaagctcggcgttcggctcgtagacggtcccgggaccccgagcatcgcttgatcgtccaacgatccgacttgatgatcatctcggagtccgctttgtccggcatggtctttcgagacgcgaacggtcgaggtggagctgctggatgctactcgcaagagagaaggagagacgaggagggtcgagttggtcgtgcccgagcgcgaccttgtcgtagtcgccttggtaggggttgtcagggtgtcacccatcttggctcagccgggtatatgtaaagatctgttttatcagcaggagaccactgatcactcctgaacactcgccggctgatacggagaggggttaggtggatgatatactcgatgtgcacctcggtcgaagcctgatctgcatgtcccgactcgacctccaccttcgtcacttccgcgagttgacctgctacaactagcaactagcaactagcaactagagtagttagtgacgcaaactgatcacactccatcttgtatctcgatagcaaccaccttgactttgctcgagtactcagcttctcagccggttcaaaacttttagactgacgcaggatctacttgcgaaagaaacgccaaccatgtcttcctacacgcaagcacaggcgagtccacaccgagacacgctccggacacctccgctgaccttcgaatcgatccctgaacgtgatagcaactcttcgtctcatctcctgctgcgacagctcctcttcccccctcggccctacccactatcgcactggtgaccctcatctcttcctttgtgctcactttctggttcaccacgtacgtctcctctcccctgtcgatgtattcactgtcaaccccttacaccccgtttcttcccgacgcttcggtacgatcaggctaccacccaaggctcggtcgatacctctcgagatcttttcggccctcggagcgtcatccctcgctggattgggcgctgtcgccctgttctgcacggtcggagtgtacgtctaggccggacggaagagaggcacaaaggggtcctggtcggcgcattacatcaaaagcctggatggtagaggggcaacacgaccgggatgacacttgcgacacgtgttagaaccgtagggagtcgttctttcctgtacaaaagtcacggatcacatgtcgatacgatattataacgagcggtacatcttcaaattcaagccaagacttttacgacggcgcggccaaccaaggttcatctatacagcctttactccccctggtccctcgtaccttccatgaactgcctacccgatcgtcttccgcttgaaccatacgacgacgaatatccagaggatcaggacgaggaagagcatgaaccagcaccagtttcctccttgtttccgagccatcttgttcatccgcttgaaggtcccaccgagtagggacgaggtggacgtaaaggcgtcgttctgtcgggttcaaacgtcggtcatcagtccgtacgtggtccacagggatggacccggagtgaaacaggtacaagataggacggcggcttaccatggatcccagctccatgttggattgtcgaacttcatcgccgatcccgacggtgatctgatgtgaccatgaatgcgacgacataacgctcagctcgacccctcgtcgcgagactgtccagcgtctttcttcacccccgccctacgccgactcacatccttcaacatcttgaccttgcccaatagaccttccaacttgtcatcattctgcctctccacctcgtgcgcagatctcgcatacgctccgctcgtcccacctcctccataagggctctcggaatacgaactcgaactcggcgtagctcgcccactcgcaggcgccgaggcgtatgaccggtctaaccggttaaagggggattgtcgccctgcggacagggagccggatgcatgggcgttgggaagtagtacgggaccggacgatgggggtcgaggggtggtagaggtcgaattcgagttgtaggcgtttcgatgtgttgtcgaggtcagcctgtggaaaaccgggtcgtgggtcgtgtcagctcgtagcgtaaagcccatgtcgcagcgtgaccagtagtctcaccgactcatcgttgatgtaggtcgttttgcttttcaatcaggcgtccagccgcttcaacagggttgccaataatggtcgatgagaatgatgtcgacttttgttgacgagtacccgcagattctctttgttgtgagagccgatgtcgccgttttttttttttaaattgggggtgacgacgcgggcgggcagtcgacaggaatggcttggattctgtactgtctggaaggcgttcttcgaggatgggccaagtagtacaaacatgaagctgtatgcaactgtctggaacagttgagaggaatcggatcgtcctaagaccgagggaggtgggggtgaccgcgccgtgatgagtcatcaattgcaggattccaacaagtatcatcagcagggaaagatcaaaggggacatgaaattggtctcattctcacctgtataaagaaccagatcgtggtggctatcgataaaccattgaacccgaagccttagggagagagacgatcattcgtccgacttttcaacgtcgaaaagatgactttcaccgtatcgctgtcgttcaccgacacctcgctcgttctcttgacaatcatcatcggtctttcgctctattcaaaatatctttccggttacaccccgctcgtgcaccctttgctcctccagaagcagagtgatgtcagccagacgaggaaacaaggcgagagcgccatctatcggaactgggcgacagggcatgggactccggtaagcagggtcttgtaaatggatcgtatgggcccagctgaagatacaatctgtctgctgggcgtgcagttctcgactagtccgtctggtgcagtaaagatcgcagcggatgtcatgaaagccgatactgccatcaacgctcaacgtttcggatgccaggtcagctctcatttcgaatgaaacgtctcgccaaagaaatcctcgctgacgacctgcccacctgtcatagatatccaactcggagttactggaccaagcgaacgacatgcttcacaacatctcgatcttggctcctcacctattctctcccaaaaagtctccctcgagacctacccatattctctcgctcttacctaccagtttacccttgctgcaactacacctcgcccgatctctaacgaaccgactccgactcatcaccctcagtcttcccatcttcctcgtctcggccatcgagtccgacttgcaccctcgaccgtccatcatctttgtccagcaagatcatgtgcatggcgtcttggagcaattggtcgaaaaggatgacaacggagaccaccccgaatgcaaagcgttggtagtggtcgttcccgagcaagacgggacgtatagggacaatgccgagctggtcagcagagccagtaaagtggggatcaaggtcgtcaggtttgagcaattgcaaagaccttgtttcaaggcggacgaatgggaacgacctggtcagtctcgcgtcttcaacctaaatcggcacatggctgatcatcgttggtctgcattctgttcaattagccccgaacgatgtgcattccctggcctacttgcctagaggaagggacaactcgaaccctcacctcgtcgagatcactgaccaagcgagtcgcgtctccccttacccgcacgcgtcccatcagcaatcgatctgatctcgagaactcgctcctcccgcacagaacttgacggcgggtatggcagcatgtctctctgcattccccgcttcgctccgtcctaccgcgcagatgaaggatacgatccagagttgtgtggatatcaacgagcctttcgggttgagcttgttatttgccagtttgcattcaggtgagtcggcgacccagcgagatgcatcccggtcctagagcgtagagacgagattaacagccggaacctgcgataggtactggattcacttacgtggaagccggaaaagctacgcaaaactcaaaggcccgtccgactatcgctttcgtgtgagtcattcagcctgaacagctggtttcacatgatgactgaaccccctcgcgacccgttctgccagccgggcaaaagacctcgccgtcgaattggatcaggtcgatcgctccgcctcgtccagtctgttctacacgctcgctcgacgacagaggttggcagcgctagacgaaggctacgttagcaagtcgggctggttagagaatgcggtctggaagactgcgaggcggggaagtgctttaggaaatttgagagcgctcgtcatcgtcggaggtcagtcttttcagcgcgcggattcagctccgaatgcactcgtcgctctcgttgctgagttgttcggtccgtttctgtttcctcgtcacagacacgcccaacccagaattgactctcaaggcgcacatgctcctctccatgccgttcaccaggatgtacatcaccccgctatcgacgggacccatcttggtttcgcatttcaacgatctgcagagcgagggactggatggcaatatgcattcgggtgcaccggcgagtaacgtcgaggtcatgctcaaggggcaagacgtggaacagattgagacgggaggagatcccactggacaggtaagcaatctgaagtccccgcccggatgcggtttttgatgattataacttccaactccggagcgcagatgtttgcacgaggtccggctgttctcaaggatatcaatctggacgtgaaggacgataggtgcgacgcgagcttgcattcactctgtcgcccattgcgcttgcctgaccttttctttacattcagatggacaccggtagccaaacgagctacggcgtggacgaacgggacttttgctctcgtatcgtaaagtgtcacagatcctcattgaatgagatggtttgaatgatgaatagatgtagacagagtcaaccatcaacaagctacccattctcacatgtccacccccacctcaccttagatctcatcccagcttgtcgcgcgctttctcacgcgatattcccttttcgcgcgctaaaccaccgaccaccaagttcaaggtttcgagatttcggtcgacgttgatgtcggtaaagacagtggaatatgcctgacgtgtagtcgttcacatgtcgtcaacaataagatagagactcatcgttgcaacaacattcggctggctgggcaagagctctcatcgttatagctcgaccatgcacgctcgtcgaacgctcgtaagagctgtaagctctcgaataccgtacgttacgagcagagctactcggacgagcggtcttgactaacgagttcaaaccgtctcttttgtggaacgtcctagcaaaaggcattatgtcgcccctgcgctatcatccacgtcaaatctcggtccgggcttcgaggtaacagatggggctcaacatgctggcccctcgaactacctcgacgggagccgcccatcgactcccagactagcagagctgtcggatctcgacagccaccacatggccaggcttagcgagatgatcagacgatcaagagaagacaagagagattcgcgtgcgagcgatgtctatgatcacgatcaggtctggtcaacgttcaaatcgttgaccaaggaaacgaggaaccagctctcggtccccatgctcaaacggatcttgcggttcgtcgtacccccagcctcggtcgtcaggcaagctctcgttgccaaacgaaatgcgacccactcgacagaggccgagatctcgagcgtgaccgagtacccttgggagcctagactacaactcgtagcctccatcatgcggttcgtcgaggagcgagatcgcaaatcgacggggaacgtactgctacccgaagagcgagcgatggaagtggaggattatcactttgtgctccgtcaattctctctcacgggccacttgtcgggctcggaacgcgtgttcaaggagatgaaggacgccggcatccccgttcccatccaggtatacgatacccgactgatggtcctcacgaaatggttgacgatcaggaaatccatctaccaacgattcatcgcctcgaaagcgcgggaagaggactcgcatacctacggtgtcggtcaacccgagctcgccaggtccaccccgttctttcctcccgatgccgtcgcgctgttcaaggagatcctcatctccatgcaagacgatcaagtggtctaccgaaaactcacgtacgacattctcttgcggatagccaaggataccaagaacgacagcgcggcggatagaatcctgaaattggcgtacaatgtcgatttggcttatccggatacggggatcgacgcgttgcgtttgcggatgagggaggagatgggggaagacccgacaggagggagttgggagttgttgaacgcggacgtcggcggggacgatgtaggggcgcccatcgccgagcaaaatgcgtccgccgagacgttcccggccgaggaatcattgggcgggtccggcaaggtcaagtggaacacccatgcgctcaacacggtcgtctatcggttcgccgagcgaggagatctcaaaggcatgctccaggcgttcgaggtctttgggaacgcccctgcggaagccgatcgagtcatacccaacgatgtacagcccgaggtacctcttccagaggtcgaggaagatgcgccagaaaagacgaatggggttgatgtcgaggacgaaccggtcaccctgtctgaagcgttggcgagggaggaagctagcggacaacggctggatttctttggtcgggcaactcgatcacgggatccagcagtaggagggggagtcaacaaggcgcccaagtttacggtccgatcggcctggcagttcttgccgtccctgcccttccccctagagatcgaatctcggaccaaactggcactcgaatcggaaggcgtcacggcggccgacctgaaacacaagaacattgagcaattgagcaacaactcgacttaccgtatactcatcaaggcatgtgccgtgcaggcgagcttggcaaaatcggtcgaagaacgagatctcgccatgacgctcggggtacactttttgaggggtgcagtgagggagatgatcgtccggcataacaggtttatgcaagtctgggtgaggatcaacgaggtcactgcggatctcaagctgccatctcctcccaaggaagagccgaccgaggaaatgcgggccttgatcaaggaggcgaggctcgccaggagacgagccgagatggacggacaactggaggaaccccctcaatcgccagtccgcccggttgtcgatcccaacccggtccgaacgaccctccgtcaacggctgcacactgtcaacctcgatttcgaccccgagttcgtccttcccctgtacaaggtacttcgatcgcagaggagtgcacgtggggtaccctcccagaaacgatggctgtcgaaatacttcaagcagatccacgggttggccgagttggccaggcggtacggcagggaagaatggaaggtgatgacggggtccgattgggttcagtgggagagtagaaagacgtcgaaacgcgagcctggaccacaggggaccattgcagggttgatacatagtttaaagcaggaggcgcaacgggccaaggaagagtccgtggtggaagcggcggatcgatcagtgacgaacacgacgtccatccccccgatcctccgatctggctcgacgttgtctccggcgttcttcacgtccgacttggcgagcgagcttcatctaccttggacgtcgacgacgagcccgttctcggtcgaggatcccaatgcacactcgcccccgctccgtaggacgatcgtgaggtttgacgtcaagaaacacttggggatcctccggacgcacgggagggaggtggatgtcattttacaggatcaggaggcgagttgggaagaatacaagcgaaagacgggaatcacgcggtcaacaaaaaagccggcacaggcgacgagcgaatcggcatgacaggttgatgtgtgttcttgactgtacagcatgtatagatgtatacttgatatgcatagacgatgctctcgagatccgacaggagccgccttgatacggttgggtcggtaccggccggtgatttttacatgggtcttgttcatttgcatccgatacccgaactcattacggaatcaatttcagttccattcgaatcgaattgatcccgtgcgcgatcggtcatccacttctaccgaggagtagtggacgagaccggaatcacccaacccccccgttctcaacctctggcaactcggacgatggtgaacgaataaccattcaaaagtagaccatctactaggtcaaaacaggagaacgtttgtgagctcaccgatctcgccataccccctatcgcccctggaatccaacatcggaagtgtccgataataaaatcagagtagcgtaccacgaggggaatacccgggccggagcaaaaggattcaagttcctctcgatcgcctcgtcgtatcgacttgtcgcctcgatcatcctacttttgacgtccgacgtgttcctagccaacgtctagcaaaaacccccgttcctagtcgaaaacactacgacgtagtagaaacacggatactacgtttccctgaccaacatgtcgatcctcacgctggagacgatcccggaagagatcttgacgagcattggcgttcaccttgcgctccttcccgaccttgtctctccgaccacttcgaaccgaacgacatcatcatcgtcgtcggcgacatcccagagtgtcgatcatggggatactcttcactcggcttcacccaatgcaaacccacgtccacacccgtcggcgctcatccccttgctccaaacgtcgaaatacatccactcgcaattatccctgaaagacaaccctaggttgtacgcagagattttcgctgggaagttcgacacgcaggctatcctacgtcgagaagctggggtaggatcgatttcgaggatccgggctagggctgggtctgaccagcatgatactactcctatggcaagcgaaggaacctcggtcgagcatgacccgagtgtgaacaccctcgatgatggtgatggacgagtcgtggcgaacggccctatcaaagctttacacctctctctggaactccgacgtcgttgtatcgccctgaacaacctgcacgaggcggtcaggcggcaagaaccaaaggtgttgaaagagcaggatgtttggacgatctacttgatgctgctcgagaacggtcagtctcgtcgggggtggtatcgagaaagaggactcgagatggaatcatgagaggagattccgaccaccgggtaactcctaggttaagacgtggagctgactcgaagcggtttgctgccttgatgaatttagatgggaagaatatcaggtaccttctcgacccttcttcggctccgacagcaacgacgtctacagggacgcctagccgagcacggtcccaacccgcccgcacaggccccttgatggactacctcgccttgtatcacaacgagctcgtcaacgatgccactcaacctggattaccgagcacgagttgcgaaagggtgttgatggtctggatcgtctggttgttgacctcgagaggtgggtctcgctaatatgcatggcacctcaaaaagggagacgaggatactgacgtagatgcgaggtgatcagacatgatcgacaccgaggatgtcgatctgttggaagagttcttgttcgtcctccggccttatgtctttgccgccggacaggtacgtaccggatcgagattcggaagaactaaagacgacagggcttaaaatggtatcgattcaaagtttgacatctttttcgggccctggacgtacacccaactgccggtacatcccggtatccccgcatcggctctccctcccttgccttcaccgtcaaccaggaggaacccttacaaggcggaactctccctgcgttcccggtcgaccacgatcgagcactatggccgtcgactacggatcgcgcctcccgttcttagccacgcggccatcatgaactttttcgcaagggtggataaactgttgatgcgagtgcagatggtagggaatgtcaccaatatcgggaacggcaatcagatcagtccggcgaatgagaggatcgtcgtattccagccgagtaggtgcacgtctacattggggttcaatcacggatcgactgacggccttgcggtgtgacagggcggagttcgaggtacacgacgtatacttcgatcgaggattcgacattgcacgaccaggactacaagcgactcacccgatgcgtcgacccgaggtccacagatgggatggggatcgaggattggtatggccgtttcaatgggtgttgggaagggaatttcgtaagccctgatcacttgtcatccaggtaaacaacaaaagacgctgatactttcttcgctcctagtcattcttcgactttgatgcgtaccgaaacatgctcagtggcgaaccgagtgctttgtacgaaggacaatttggagaacagtcccaagtgtggaaaatgcgagaggtctacgtccggccgataagggcagaaggatcttcctcaactacaccgctgcgacgaccggaagctaggaccgcacggtcgggattgtccgaggcttccgaggcatcaaacgcgtcctctacgacgtccgaaaccccagcaagcatgtcggcagcgctcaacgcgggtttcaccccgctcacgtcggcctttgaccggatcgtgcccatgctccctaatcagggccgtatgcacagttcgagcatgaccaccaacgccgtggtcaacctgctggaaaagaatccgaccgacgaacacctcgtcgccatgttgggcgggttggaggggtacgagatggtgcctccgcaagaggtcgagaggatcatcaaaaggcgtaacgagggcgatgaaaatggggatcccgttgcggaaggggacgatctcgagatcatgttgctcggcaccgtgggtttcagggttcgggtctgtagtgtactttgagagctgacatgtcctttctacccacagggacattccgcgtggggcgaattcttgttacgagggagggtccgcctttgggatgggatggccaatctcgtcaaggaatattcggtcagtctcggatcgagtaggcatcactaactgcgataaggtagatattgacttgacatttactatgttcatatagcccgacggacgaggcaaatgggtctatcgtaagccagattccttccgatatgacctttctgaagaggtgactgatctgacgtttctctcaggaggatacatcgtctcgggtggtgtctttgtaggccgatggagagactgcgtgacccccgacgaatacgtcggttacgaaggtaaactatttcacggctcaatcttgcttgctgaaggcttaggcgctgacttctgcatcgatatcactccgtcaataggcacatttacgctgtctcagcgtgtcgacgttgtccaatgattctagcgattgtacattgtgacctggtaaattgtctacttttcttggcccatctcttgtatccgaactttgaaacgcataccctgatgctgaagcgggcaatgtgctaacccttcttgtatccctttgtttgagacatgtacacgctatgaatattgcggcaagacgcgtagcagcataatgctttgggttgactctcaatcgtccagctgactgtctcgagacgagccagaaattcgagattccagagtagtacgggctttggaagcaatcgcaaggctgtggcgagaggatattgattcggctcggattggtatgacttgggtagttgcagaacgatgatattgcagccgcatctggacacagaggaacgtatagcataccagtggcatcgtctcgagttgtatcaaggtggagccgaggataggctcatgccttcttgagcgattgcggtcatctcgggatcacggtgtacaagatcaagtccccgcatggtagagatcatcgactgtccgatatcgaagtgggatacaaggttgagatcagacgagacagacacgactcgatccgtcgccgtcaccgtcatccgaaagaacaatggcaatgtcaaagccgacgacgtcaacaaagacgatgcagatattctcgagcacgccgggcgcattttgggaaggtatggtacagcatcatcgtcatggccaagagacagctctcttgctcttgactctttctcgtccagcgcgtccagccatctcgagcgatcaacgacaaaagggaatatcggagcagtgatgccgccggaagcttccctatgctgtgccgagccgaacaaaagttcgtagtctgcgccggatgaggacgcctaaaaaaagatggcgggtcagatggacctgggtagatcgacgcgacgcgacgcgtttgggcgttttcgcaaggctgcggctttggcagtacagaatcgcctgccgctatgaggagatactttttccctcgactcgcgacttgagtggttcgaagctgtaacggaaggcgaccctcttagcctttgaggcctttgatgagcccaacgctccactctgcttgcccatacgcgttatacgttacttgatcgatagctggtccctgatcgtcagcaaggggcgagatgccgagcgaactagattgtcaatgagcagggagcgaaagacgaggaggtcgtggatatttcctactccggaatgacacgcgcggacttcatcaagccacctctcgcttccagcgttgaccgacctgctcaccccaccgcgcgagctccgggatggcgcaggtttgatcgtcaccgcctagagacactggacgggggcagacagcaggaagagcagggcgacccatttgagccacgcgaggtgcaatcgccaagcgatcattcccccggtcatcaaacatgccctgccttcgtacacctgctagtgccctgatcgtgcgtgtgttgtgggatcttctacccgccatcgtctcgccgcctttgccatcatcgcgatcgcctcgcccagtttgcgttttgcaccagccaggccagtcctccgtgagtccgagtgatatagcatcagaccagattcgaatctacataccatactctctctcatattcccctcttactcccttctcctcgtcattccatcccgtggttctccttcagtctcctcacctctctctcgtctctcataatcgaccagcagaagattgattcttctcctcgtctctcctcccccccatcctctcatcgtccttgcacatcacaactccttcgctttcgatcccaacggaaacgtcgacctcgagtctctctatatctgaacctgcattcattcttgacgaaggagcagtagccactcaaccccgactatcgctccattcaccttcactctcgacaagaaacgcagtctccagtcggaatcaggctcgaccttccatccgatttttacctttctacacctgacgccggccgtcacatattcagatttcgggacgataaccaaaccctcgtaacataatcggacatcttgaagatccctccgaccctctcagctagactgaagaagaaaccgaccaccacggacctactcttagcgatacatcacacataatccaacccaagcgacaagatgttcacctccaagttcgcttccctctccatcctcctcctctcgcttgccgcgcttgagcccgtcgtcgaggcttcgccgttgaccgctcctatcgggcgacacgccccgccttaccttgccagcaagatcggcaaccacaagagggcgatcgccgcttggttccagaagggaggaaagtcgttgaccaaggacgctgaaggtgatgatgttgccgtcagcgtcgagactcagggggaagttccttactacggaacttctcacggacttgtaagtcgtcgacattcaggtcgtgcagattggcacagtcgttgatgcggatgaatctcctagttccctcctcgtgccgaagccgaggaaaccgagtattacggctactcgcaaggacttgtaggtttctacacacccaagtagctgatggggacacgatgctgaaatgaattcgtcctgctctgcagttccctcctcgatcgaacctggatcccgcttcagagaatgaacacgccgacctcgccgtccgagccatccccaaggctatgccctctggctgggcttacgaaggttgtcttttggaatccagtggccagaggttgctgcaaggctttgccttttcttccggcatgaccagtaggtacacctgcgccagcgtctgcggaacgatgggttatgagctctcgggaactcagcacgcgaatgaggttagtttcagatggcggcacggctatgtgtgcaaaggtcttttcgctgatgagagactgcatcccgctgctcgatagtgttggtgtggcaacgacttccgaggaagcggaggtgcccaaatgcccgagagtgactgttccatgaactgtgcgggcgacaagacccaaaagtgtggagcttcgtacaggttgtcagtgtaccgtttcaacgggactgtaaccgaaaccacgcctgctgctaccgcttctacctccgctaccgccactcaagcttcgactgccattacaaccggcaccgcgacggcaagcatgacctctgccaacggaaccgctgtcgccactggaaccgccagcgttacctcggtcaacgggaccgcgattcagaccgggaccgctaccgtcagtggatccgctcccaatgccacttccaccgccgctcccggcgaaaaggagtggttctcgattggatgcgccgtcgacgtctacaccgatgtcaaggacaggatcttgaagggacagtacttctggtaccagaccgacctgaccatcgacaagtgtatcgatatgtgtgagaacgctggatacacctacgccggagtcgagtggggacaggaatgttactgcggcaacaccctcccttcgactacccagttcgtggacgatggcgagtgcaacatgccctgtgctggtgattccaccgaaatgtgcggagacgactttaggatgggaatcttccagttgaccacggctgaagaatgcgagggtgaggagcctgtggtcacctcgtccaaggctgctttgcctacgggtaacatgcttgtcaccgggaccgccgcggcgcctaccgagcccatcactaccgtggtctcgaggtcggccgctgccacttcgatcatcgccatccccacctcgatcggagtttcctcctcggctcccgcctcgtctgttcgcccttcctccatggccacctcggtcaggcccgcttccaccaccgctcgcgccagctcgtcggtcaaccttgatggacccactcccaccggattggtcgagcgtgtcagcaccaacattcccggttccaacaaggcccacgaagtttacgctcaccacatggtcggaaacacctacccttacggcaaggccgactgggccaacgatatttccatcgccaaggccgcagggatcaacggtttcgccctcaacatgggttcggattggtggcagaccgctcgagtcgccgacgcctacgctgccgccgctgaagccggtgatttcaccatgttcctctcgctcgacatgaccgccatggcctgtggatccgtcgtcgacgctgctaccttggtcgcgctcgtcaacacgtttgccaagagctcggcccagactttgcacaacggcagggtcttggtctcgaccttttcgggagaaaactgcgcgttcggtcgatcttccgccgccgacggttggaacacgatgttcaagaagcctctcaagctcgtcggaaccgacatcttctttgtccctagcatcttctctgacccttcgtccttcggttcggccgaatggatggacggagaactcaactggaactcgggttggcccatgggtaacactccccttgatacctcgagcgatgagcactacatggccgcgctcggttccaaagagtacatgcccgccatttcgcccttctttttcactcacttccctacgtggggatggaacaagaactggatctaccgttcggacgatttcctctacgccaaccgatgggagcaagtcatcgccatgcgtgaccgtgtcaagtttaccgagatcttgacctggaacgactatggtgaatcgtcctacattgcccctactgctggcgcactccctgccgggtccagcgagtgggtcgatggcttccctcacgacgccttgatggacgtgaccaagtactacgccactgcgttcaagacgggcgcttaccctgccatcaccgaggacaaggtcatctggtgggctcgaccccatcccaaggatgctcgtgccacctcggattacatgagcagacctgatcgatggaacgacacggacgactttgtctacgccctggtctttgccaccgcggatggagtcgccaccttgacctcgggtaccaacagcgaacgatacgccgtcaagactggtctcaacaagatcaagctggccatgtcgcctggatccgtgaccgtcaaggtcaggaggaacggcgtcgacgtcgtttcgtacgacagcacagggtcgttcagttacaccaacacccctagctcgtacaacttcaactatatggttcactcgtcttgatcggactctttggggaaaaggcatcgtcgttattgtatcttaatcttcttcgcttccttcctatccgtggtcgagagagaggcgagatggagacgtttcccgcaggcccggtggtttcgatcgacgctggacgtcgcaagatccagcctggagcgttatctgtttcactcctcatcgacccggatcacgcatgactagatatatgcgccgtataatgaaccatgcttgcatgtctgtttcgcgtccccacctttttcactcgactgatcatggtcacgtattcgatgaaacgctctctctttcgtgctgatcgtgttgaaaagcgcgtcgcctcttccttggttgttacacttgtttccacctttaacccaatcgcgattcgccttttcgaacgaatccatccctcgactttgatcaaaggtggccaacgtttgacaaagtaaagggacatcgtacagctagtagctagtgatcgactcacgatacaccacgtcttgactgtatcaacttatagacctcgagaccggtctcagaacaaggaaaacaaacaaaaaagatgaaccctggagcttatcaattcgtccctggcggcaactttgcgccgggtgccggtcaacccggtcaacctggacaacagcaaggaggtcagcccggtgccaacccctacaacccttacgcacagcaacagcaacaaggagccggtggatactacggtcagcaaatgggctaccaggcgggtggttaccaacagggaggatacggaggtggttaccagcaaggaggataccaaggtggataccaagctggaggttacgggcagcagcaacagggaggataccagggtggattcgtgcctcgagctcagcaattccagcctcagcagcagcaacaacaacaaccaccacctgctgctgctactgccaacactagcaccaccaccacccttcccggtcgtcagagctacatccctcccgcttccacttcggccccggccaaagccgtcagcttgagcatcggcggtgcctcgaccccggccaagagcatgtccatcagcatcggatccaagaaggtcaactcgacacctgagaagaaggacgacaagcctgccgcacccgccaaggtcctcagcattggaggagccaagaagccatccgccgtcgaagagagcaagtctgaggccccggccaaggcgcctgtcgtggagaagagcaaaaaggaagccgaacccgccgactgggatgccgctgacaagcctaccgcgcctgctcccgaggccgtcgcccctgccgctgtgtccacccctgcacctgccccggccgaaacacctgcccctgccaaatccagcgccccggctgctggatccgtcatctcggaatccaagactaacttttcccgacaggtcgcttccactgatgcggatgccatcgcgcaagaagccgctcgggtcgctgatgctgatatgctgcaagagctttacggaggtgaagaggccgatcctaacagtacgtcttaccgggaagaagaaggatgatacccacagcgcaccgtgaggttgatcatcttttcccgtcatttctcgctacagtcaagcccaacttgagtaagctggtgttccctttattccgcatcttcggcaaagtgaaccagcgactcatcttgttcctgttgatgatcgcagacgttgtctttatcggtcacgtcgatgccgggaaatcgaccatgggtggacagctcttggctttgaccggaatggtaagcagctttcacgggtcacgtcgtgcttgatgatcgctgaaccggggtttcttcggcccctttttttgtacgacaggtcgaccgacgaacgctggagaagtaccaaaagtgagtcccccactcgagatcaggggacgtgacattggcaatgttgatagagcctcttttcctctttttctcagggaggccaaggagatgggtcgtgaatcttggtacttgagttgggcgctcgacagcgacaccaagtaagcagaaagcgtggatcggcaggtcgattccgtatagcctgacaagacggtttcgacagggagcgagccaagggaaagactgtcgaagtcggacggtgagcactagagtttttcgttaacctttgccactgtacggaagtgcttatgcgagtattctcacagagcctactttgagactgatgtcaggcgatacaccgttcttgatgcagtacgtccacaccgattgtaaatacgaggcgccggtgctgacctcgattcctcaatggtctcaagcccggacacaagacgtacattcctagcatgatcaccggatccagtcaggtaagccggtcgtgttgcgatcttcaagttcaatgcaccaactattcgttgtcgcaggccgatctcgcagctctggtcatctctgcccgaaaaggagagtttgagaccggtttcgaaaagggtggtcagacccgagagtgcgtaaaggacactaggaaaagaacaagggttctagcaactgatgagctatttggcaggcacgcgctcttggtcaagtcgaacggtatcaacaagctggtggttgtgatcaacaagatggatgactgtgagtacttggactcgagtcccgcacgggcgttatcgcaaggctgattttctcgactacttgtgcagctaccgttgcatgggacaaggctcggtaagtctcgatcgcacagcgattcctgtgacctgcccattcatcgcttcggtccgcaatacagatacgacgaaattgtcgagaaattgaccctcttcttgcgatcggtcgggtacaaccccaagactgacctgactttcatccccgtgtcggctttcaccggtgccaagtcagtagcacatgcagcgttctagaaaaaaatggctagctcacccttgaatccgtcgtgctctatagcatgaaggaccgactagaccccaaggtacgtcatgaacgaagatgctttcgcaccggcggtccctaataatcaatctttgaatatactataggtcgcatcttggtactctgggtgagctgtggctgtaccacctctagtcgtgaaacgcaagccaatcttaacgctcctctctctagtcccgccctcttggagtacctcgacaacatgcctattgaggatcgaaaatacaacgaaccgtgagtcgtagtcctgcctgtcaacgtacctcctcgtcctgacgcggaattctttggcagcttcatgtttcctgtcagcgaaaaggtacagacattgctaatgtatcgatatgagggtctcttattgacgccattcttcacagtacaacgagctcggtgccatcgccgttggaaagatcgagtgtgagtccttgaaagtgcggcggagtagtactgtggccgcgatctgacaaggcattcctgcgtctcattagccggtcgagtgaagaagggagacaccgtactgctgatgcctaacagggtacgtacttcgtcgcccaccttgactggcgaatggcaccattgacccgcgatctgataggcccccgccgaagttggagccatctacgacgagcagggtgagtggcgggagtcttgttctttccaagccagtacaagtcgctgatgtcaatggctttcgattggtgcaggcgcggagctcgatggtgccctatgcggagacaacgtccgaattcgactgaagaagtcagtcgtcgatcgcgactatcagtcgagcgtgcactgacatgggatttcatttcgtagcgtcagcgaagacggcctgcaacctggattcgtcttgacctcgcctgtccgacctgttcgagtggctagacgattcgaggctcaagtcggtgagtctacactacgcgagttcttcccctaggtcgcatgctcatgctggctttctttttcgcagccattctggattccaaggttcgaaaggttcgatgtcgctgcaacgggcccacgactgaatcacctccttttgattcgtagaacatcatggctgctggtttctcgtgtatcatgcacttggtgagtgccgacgactggcgtcttgaaggccagacatcggcagctgaacatgtctccaccgacagcacacattgagcgaggagatcaccttcgttcagctcttgaactactacgacaagaagacgggtaggaagagtaaaaaggtcagtcaccaggtggaccagactgcaaatcagcagagtgggagttgatgcctcaatttcacggtcacaggcaccggcctttgctaagaagggtatgaaggtcttggtcttgattgagacaaccgctcctatctgtgagtctacgtcgctggaaatgatgggatgtatgtctcgctgacagatgacggtgttgcaggtgtcgagacgtttgccaaccagcccagcttgggacgatttaccctccgagacgaggggaagactattggtgagcatcgatccgatcgattttaacactcgcgtacggaacccgctgacattgggtttcatcgcgacacaggtatcggcaaggtcaccaagatcagggagaggacggacatgcccgccatcgaagagttgtccgtcaaggacactcccgaggccgccgcttaaggagggacggaaattgtcatagagacggatgatccgttgtattacaaaaggcatgacgatgattaacagcagggatcgaagttcttagtcgggccttttgtcaagctccaaataagactctggctcgagctctgatgacgtaattttccacgcaagctttcgagtcgcggtgaaacgtttccttttgtccttttggtcggcggcttgtgacctcgatcgagaatcaccagattgctgaacctcctcgatacgctgataggttcgctgttctagaacatcctgtgttttcaggagaccctgcaattacatgccaaagatgcggtatctgtgcgtccccccttttgacgagtaacgagcggagcggtttcgagggttgcccagagtttgtgatgatacgacaaccctttttgaccccgggctgtgtgtggcgcggcgtggcggtgtgtgatgggaacgaatgttttgtttacgagatgttcgatttgtggctgtgacatcatcatcaatccatcaaggttttgattgaatttgatgggctcgcgatcaaatgatgatcaaaggaaggaaaggatgggagctgggagcgagtcggggtctcaagtctcgacctagtcgtatagaccgggtcaggtagacttgctatagctctagaatagctcaacccaatcgactactgctgctcgtagcagcaaaagccacgaagacactctgatccgtgctgcttcgacatctttggttgcccctgacatacgaacggcgaccacgataacatcttggggacaatcgatatcgccttgataccagaccaacctcgaatatcctcatctgaacgatctttaaagcctgccacggctctctcagatcttctcaagctgccatcatggcccactcgaacccttatcaggatccgccacgcccttacccggactttgacgattctacgacctcgcttgtcctgccgccgcatcagaacatggaccgacacgatacacaaagtgaaccacaacattacattcccaatccggggcaacccgacttgagttctccgtattcgcctcctggaacctactcctacgctgcaccttgtacgccatcctccctgaatgacccaggttcggatcaattcgatatgggatacgccggtcatttgcaaggtaggggaaggacggggttcgggggagacgaggaggaggaaaaagctcctcttaccgctcagtttcaacaaggagggaagtacccgcccggtacccctggatcgtaagaatgtttcttggaactatttcttcgcctcatagctcacgggtctcctatcccttccgcacagcaaccaccacttcttgaattatgacccacactccaactcgtcagcctctctttccggcgggtctcggccccaatcgcgagcttcgggagagaccggtttcatccatcgtcagacagtcaagaagagaggagcgacgaccaaaagggttcagctgaccgctgacggtcatttcattcgagagtaggtcctttcggtgccaaacccatcgggcgcaggagaaacagcactcgtcaagctgacgtcgaaaatatgcagctatccggttcctagacccgtctcaaacgccgtggaagcgaaatggaaggacaagtgtaagcccaccccaccgagcctttaccaatagccgtctaagtagccgttgcttctcgcataggcaacaccaacgagttcacgcaagtgcagccccactgccggatgatccgcaaacgtggaagctcaccgtcctcctcataccacaggcacatgaggtactcggcagtcacttgcgatccggatgatttcacgagagaaaacgggtggagcctgcggacgagcgattacggaagggagaccgagttgttgatcgccgtgactagctgtaagccgaatggcgtatgatccctcgaaagtcgttcaagctgaatacagtctgatgggaggatagacaacgaggacaagatcttgtatgctcgaacattgcacgctttgatgcttaacatccgggacatttgtaataccaaggtgtaagtctcgactgtcgatagcgctgtcctccggagtctagctgaaatacgtgcggtagatccaagttttggagggctcaggcggaagaaggcagaacgccttggcagcgtatcacagttgcactgatcgcagacggactcggccccatggacaaggggactctagatctactcgctactgttggggtataccaagatgccgtcatcaagaaggaggtcggggataagagaaccgtcgcgcatatcttcgaggtctgtgtgctcagtcaactgaagaaagctatgtagctaaccaaaaccatgcatgccttacgcagtatacgacccaaatatccgtcgatgcaaagccccagctggtccagccctacccgggtgatccgaacaatctcgtcccagtacagattatctttgtgctcaagcaagaaaacgaaaagaagatcaacagtcataggtggttgttcaatgcgatcggaaggatgttgaaaccggaagtgtgcgtgttgatcgatgccggaacgaaacctggccacaaggccatttatcactgtaagaaggtcaaatttaaagccatgaccgatatttgctgatagcttgatggtcgaacctcagtgtgggaggcgttctacgtgagccggctgcatagttgttcttcaaccggtttcaaaattgaccgctagatttacgtagaacgatcctaatcttggtggagcctgtggggagatcaccaccatgatcaaaaaggggaaaaagttgatcaatccgttgggtaagacaaccattaacgatgttgcactggttgatatgcaaactgactcattccgtcgccctcaaagtcgcggcccagaacttcgaatacaaggtaaagcgtccggcggctctgggcctgaataggaatcatgataactgatccagatcacctcctaaagatgtccagcatcctggataaacccctcgagtcctcgtttggctatgtatctgtgcttccgggagcgtttagcgcgtacaggttcaaggctatccaggacaagcctctggaggagtacttccgtggcgaccacagtttggcggatcgactaggccccgatggaatcaacggaatgggcatcttcaagaagaacatgttcttggccgaagaccgaatcttgtgcttcgagttggctgccaaggctggcgagaggtggacgctcggttacgtcaagcctagcaaagccgagacggatgtcccggaacaggcatctgagctaattagccagagacgtcgttggttgaacgggtcgatcgctgcatccgtgtatgcgctataccacttcttcaggatctatcgcagcaaacatgggcctgttcggcgagtcgactgatacctggtcgtgccctcgcttccacgaactcatcgcctgcccgatacagtatggtcttgttgcatattcaagccatcgtaagtactagacaataccaaaatttgtcgattgatgttgaccgccactgtttggcaacagtataacgtgtgaggaaagctcaacaaagacgcttatgatcataaggattgacatttcggctgtagcgcctctctgttcctctcacttttcggcttggccaacatgtacataacctttgctatcagtgagtcctttctcgccgccgagcgataattcgcgctaatacaagcattctgaaaccatagtcatcgatcttcttcccaactccactggtatcttcctttttcacaacgccgctatcgtcagtactctcttgcttgatctatatgtgagctgaacaaacctccctaacatgggcggattacagacgcattgggtcaatacggcatgtgtctggttgtatctggcgacgcttgggcttcaagtaagccgatcgtttcctgcagtgttccttgttcagggtgttgataggaggaatccatctaggtagtgcttggcttgggcaatcgacctaagggagaaaagaagctatatctggcgtctcttgtcgtgttcgggatgtgagcatcgtcaatgagcgactcgcaaatcgctggactcacatattgcatcacatcgctcaaatagtatgagtatttatacgctgatttgcgccgtgatgctggctgtaaaagctatccaggtatgtcaatctgaagccagagtagaaggatagacagctcacaatgggatggtcgatgatcgacagagcatattcgacggcggaaatgccctgcaaggcttcaagaagctatttacgacagtcgaaggattacttgtcattgctgggctctctatctttttcttctacttcgtttcctccttgttgttcaggtaaggaacctcttcgtcggcctcttcgtttgcatgctaacttcgagcatgcccccccacccctctccacccggtcgatagagacccctggcatctgttatcgagcatgcctcaggtaagatttgcgaatcctgctgtacaagaacagaatgctgacttgacgatggatttagtatctggtaagctcattctggcgcgctttcattcacataggtattgagaataccaaattcaggtcgttgccccttctttcgtcaacgtgctcaatgtctacgcgttctacaatctcgtgaatctaaaagaagcatatgtgaagccgaacgacattgacgatgttgcctcttatccgtagcatgatgtgagttggggaacgaaaggctcggacaagatggaagccctgccgagtctcaaggtggagaaagaagccagtggagaggtggtcgtcaaggacattcagcgggtacacccgcacgccccgatctcgcatgtttttgggtgctgatattttcatctcgataggatcaagacgagctcgacgacgcctttaaacttgttgtttcacgttgcgttcagcctctaccgaaagaccatactcgcgagaagccatccgtagatgaccagaacaagacctttaggtgggttcgaccggatcggatgtgcagtcgctgagctgaatacattgatcacaggacaagaacattggtcgtttggctggtctccaagtgaggggtccgatcgcatttgaatcgggaacaccgtctgatttctgcccacttgtcagcgccgctctggcgattgccataatcacgagtagcggattcgaccagactcacgagcaggcgcaaggctgtttcggagacaaggctactgacgatccgaacaatgcggacgccggttgtgcgcagcgaggtcagtcgatgcgccgaagcgagcgagtcgattgtcacactgatcgggtttcgtcccgtcatctagcattggccgcgttgttgaacgaggacaaggaggcgcaggacaccaccaaggtgagtgcgcaaagttacgggatatcgggatttcgaggctgacgggatcgttcctcgccgtagtattactttaccggcttgctctacgccactgccgggatcacacttgtcaagtttatcggagtgggtcgatcgagcttggcgtgagcccgagccgacagctgaaagatcatgtctctttgcagtgcctggttttctggctgcgccgtcaaacgggaaggtacattctgagtcctgcctgggtcggaatttacaagcgggatcgctaaccgcgttcaaactggttgtagattctggcgtcgcaactagcgacgtctgacatgccccaaaagcggccagctcatatatacgaccaaagtttccgcaacctgtcctcctgcctttctgttccgatcacgttttcacgaccccgacggcatgacatcgttgtttcccggcccctcctgttccatcgaaacaccacacggatcgcgtttccctcgactttgcttcgaaatgaattatattaaagagattcgtgtcgactacaattgatcaagatcagggtcgtgtgagttcacgaacgactttacaaagcactacgctgcctcgcgcgcgcgtctcgcggaagccaatgactatcctctccttctaccctccctcggctttctactgaggagcggcgacgggcacctgagcgacggcctcgtcgaccttttcagtgacggtgggcgcgacgtcgtgtgcggcctggtcggtcccgacggtagccttcttttcggaagcgatcctgacggcctcttcgtgaacgtccttgacctgcttggtggtcgaggtgtagaactgcaagaccctgtcgaacgcacgcgcgaggggaatgtatatcagtccggtgtggtcagacgatcacagaccgccgggtagagactcacttctgaccagtgttggtgttcatggccttggaatagtagtccaagaagaagctcgagattcccctctgctgatcaatctccttggccttgttggtagcctgggcgagggttcctccgatgacacccgagaccttggcgtcgggctggttggcgactgcagaaacgtggagcgcaaggaagttcacatcagggtgagatcagctcggttcggttcggcttgtggcatcaagtacaagttgagaggaagacggcacggcagactcaccggtagatccgaccttgctgtcaagcttgttcatgtaagcgaggaacttgctcgagattccctgcttgtggtcgacctcgatcgctcgttggatcaacaagtccgagacgtggtatccagcggcgaggtctaagcaacggtggtcaacgtcagcgacaataaaaaagaccccgggcggcatgtcctgctctctatcccccgggaacaacgatgacaagagacgaccacgtacattcggccatgatcccagccttgggcttgtcctcttgggagatgccgtgttcgtcgacggacgcgggaggggcaccgataggggtggaagcattggcgtcgatgggcaacgaggtggatccggcggcaggggcggcggcggaggtgacttccagatgagcaccatcgagctgtgttgtagaacagagagtgagggagggatggagagagacgaagacgatgatagagtggctgttcgtcagcaacggtttcccgtgatcgcgatgggatgatactcacggtacctccgttgagcatcaaggcggtcctcgcggcgctctccttttggaaagtgatgtcggcggtgttaccttcctttctcaagctggagatggctccgcagaagaggaagaaatccttgaccttgtcctccgaggtctcgggagacaatccggcgacctagaaacgcaggcaggcagggcagtcaagcggggagggtaagcaaggggtgaacccggcaaagctcgaaaaggtggtaagcgtacgtgaacggcgtaagacatgtttgtttgcgggtttggtgtgttgtatgggggggtgatatagaggatgggcaagtctgatttgctatgaatattgatatggatgacgatgatcgatcgagtggtggtccgtacgatctttacttggtgcttgctattatcagtcaatcgctgttgccagctgctgctctaccttgggtttgcgtgacctgtacgatgatggatgggatgggatgatttctctcttgcttatcgctccatgtcacgccctcgctccctccctctcgctcccgcgcccctggccaacccgcgcggaaaagtgcacgccatcgacgtcatttcgaactatccaccatgcacatcgttacacgtcgcccccccggccgactgccaacttcacagccacccagcgtgttctcgtcgcttccgtgatgcgatacgccgagattcaatctttgcgaaactgaaacccccgacgccgtcaaacttccgactggctgctagttgctagcttatatggaaaggatttgctacgagagaacatatcgagcgctgcaagtcgacggtgacgtacatgctcacgcgtcttcatggatcgaacccagaatgacgttcattcgacagtgcgagggatagcaaaggatgtttggatcacggacaggtgttgtcgtccaggtgcccagtctgtcgagcttgccgtcgacgtcactcgacggacatcttttcaaaaggtatctcgtcggtccagctggttttcatgatcgaagacagcattccccgcctccagacgatcgatatttgaagaccagcttgattaccggtattacgaccgtgagatccttcaaacggtcgtaggtcagcatcgaacgtttactactgggattgggttagtaacaacctattgtatcgctggaaattactgaggtgtccctccgatcacgcccaccctgctcgcgaaaccatggggcaaatttagagtattggggacgctgcgtgatcatcccggcgctggtcaatgcaaaacggcttcctgatctcaccatacagcgtcactcgcagcctctacagccgttcatgtatcgtacaccttgctcgacaaaaccagaacgaccccaggcaccgcgccgacgatgatggcaagctaagcttgggagacgactgttacaccgtttcgcaagataaagatccggaagtagaattctgcttccgatgtcccggtcgatcgagagcctaggacgatgcccgcatgtaccgacgtactagatctggcgtgcccttggactacgatcagcctgttcctcttcacatcctgctcgctgctcaacacctgaacttgaattgaacacccacctcgtcgtcgtcgtcgtcgtcgtctcgctacaaaaagccgcaagaagcccccgtccttcgcaccgacgatgcccatccctacccctacctcgacctcgacctcgacctctaccccgcctgcccggctggaagacgcattccagccgatcctccccaaggtagaccatatcctcggtcttatgcgggaacatcaagctcgactggccgtcctcgcccagaaaggagaaggagagggggagggggaggtttcgaacgggaatgggagtggggagcaggtcggggcggtcgatcttgaggacaagatcatcaaagaggcgagtctacctccgcttcgccctcctactttctcatttcttcaagctacctagtatctgacctcgatttctccctgccctacctggcggcacaggcatcatccgcccgactcctcctcaacgcccagaagaagatggcccatgatctccccggcggacacctcagttcgagccaggtggaccgagggatccggaagaccgaggatgagatcgagaggaatcggtcagtctgcctttctcttttcttctcttttcgattcgattcgattggtgctccactcgattcgattcgattcgacttggctcgactcggctcggcgcgggtagggagtagggtcgagctagtcgatcagagcgaggagtgggtggacgagagggctgacacccgtgcggttttcttttttgtgcttttcgctggacgatgagtagggagatactgagacggttcgacgggcggatatcaggcgctgggaatatcaacaggatcggtaccgtctgaccatgagaggaggatacatcgtcgcagacaggcgcgagggaattgattatgggagtatcgtgtcgtgttcgagcggataggagctgggctgtttgcgaacgtacaagaacagtacaacgacgccgaacccggcagagaaaagaaagagagacggaaagagggcacaggagtgtaagagtgggaaccgacggcgagacatggcaaggcggccgagttgacgaaattttaacgataccgagacgaacggacgctgtattacgaggtacgggatatataatcgagtagggttcgaccggccgaactcgggtttcatcgcgggagcatggaggttattttaatgggtgtatttatccactgctctcgctagacgctagacgctacacggttttacctttggacaattgtcatcatttggtgcaggtccaaccgtgaaatgtcaaccccagggttgggctgggcgttgtaacgatggtttgtatccgcctgcacgttggcccgtctctccctgccctgtttcttgcctcgcgcgcctgtcaacaagacgacaacaaacaacaacaacaacccgatggaggtggaggggggaggagggaggagaagtccgtgggtcaaagggcaaacttgctcttggtacatcaacacacacacacacacacacacacacacacaccagtctcggagtggggcgtgacgatccttgttactagcggggttcactcacctcgcaagctcgcgcctacgtgcgacgacctggttctccagatctgtcgagatatcctcttgatgaaacctaacaaggctgtttcaagcctgaagagcgtttgttggcctaacgttcaaaagcgagttgatagctactgtgtgataatgaaatgatggccggtctcgccagtcgttctgtatgaccgaggaggcgtccgatccggccagccaaacgctagagatcggggaagatcgagacgcgcgccccttttgccgcccactcgcggtccggcccatccatggcgtttggccctttctgcaccaccgaggagcgcggagtcaaacctgaagtcgaatccggaagctgaacggccggctggcgttgatccggttaggcccggcgatcggcggtcgaggcgcgcagccgaccatatatcttgaaacaacacgcaaagcaagtcgtacagcgacaaggtcagacggtataccctctcagatatgatacacgagctctagcacgatacaaggggcgtgagaaggagctctaggcggcaatatgatcgacctctcggtcccaaactcggtgcttggccaagaggtcggtccactgcttgatcatctcgacaccaaacccggccgaagggacaaataggacacccttttcttccttgatgtcctcgcccgtcttgacactcgttgaaaactcgccaggaagcgccagatcggcgatccaggggatgcactgtccatgggcgagcaatggcttttggtggaagaatccctcgatagcggcatgtcgaattcggccctgcttcctgagcttgtccgtgtactcgatgtcgttctcgtcttgaggtccgacgaagatgagcccgtcgaagtgggtggatcggcaggtctcgaatgtaaactgcgtctgcacagtgactgagccagaagagacttgtcctttgacgggtccaacaatctgcacgagaggtagtggtaggatccagcttctgctcaaatgaccataccgcagtcaagctcaccataggaatgatgccgctggccaagaaagcagtcttgagctcgccaacaacagcttgattgaaaccgggcaagacgaaaattccgacctgtcggcccttggcgctgtgtacaaccaataagagagcgcttagccttgagctgcaccagtaccgacgaccctgcactcacgtaaagatctggttcttgccggtgacttgtgacaagaactggctcttctgcccatggttggggcggacctcgtcgggaacggacaagccaccgaatgctgaggcgatctcgacggctaggtcgtggtcaatgatgttgtacttgttgatgatgcgctgctgaacttcggcctcgtcacacttgccgagctcaaactggacggccgagacgaagtgcttcttttcgacatccgaaagtgaattgtagaacctgcgaccaaggcaataccgatcagtccaaattgacaggaacgtcacgggaacatggctgacaaggtggcctggttataatgttccttaaatttaggcccatggatacggtcctgaacaccttctactttggccttgtagtttgcgtaagcaccgtctgagacagagctgggaggtgcgtggttcttgcggttgggatagtagttcatcgagtcggcggtaaaaatgttcatttggtgctgaccatctcggtggttgtaagcaaatgggcagacaggtcggttgatcggaatctgatcgtgattgattcccaatcggctgatttgagtatcgaagctggaaagtccaaacgaagctcagctgtttacgcgcttttcacggccaaatctacggggacttactagctaaaattgcgcagcgagagtaacgggtcgtccgtgaagtcgatctggaggtggtgttacagtaactgttacagtgacggtaaggtcaagatctcggaacggtagccaacttactccgggaattatatgagcggtgcaaaacgcgacctgctccgtttcggcaaagtaattatcgacactataaaatgggaaacaatgaaatgagtcggtcttcagagggcttattttaagacatgcctaactcactttcgattgagctccaattctccgatgaattggatgggaacaagctcctcctgcgttacaatacacgtaggtcaaacagagcgcccgatgatccggcggggttgtgcttacaggaacaaatttggtcgagtcgagcaggtcgaagtcgaatttgtgctcgtcttcctcgggaatgacctgtacaccaaagtcccacttagggaaagcgccgctctataaatatcccgaagtcaagcgtcagcgaggtgttgcaggggaaataaagaatttagttcgacttgcgtcaatggcttcgtagaggtctcgcctgtgaaagtcgggatcctgtccggctaatttaagggcttcgtcccaaaccaaagagtgcgtaccagcctggggaacccagtggaactttacgaatgatcgcttgccctgttggaaaggatcgagaacgcgaagtaaggaagcgattcatattcgatggcgggtaagtcaggagagcgcacctccgcgtttactaatgcccaggtatggacgccgaatccagggatatgcctgaaagatcgaggaatcgtcctgtcactcataatccaacacatcatcgcggcggaggcgtcattaaggcccatgaaatcccacgcgttgtcatgggccgtttgagcttggggtatctcgcggaccgggtcaggcttgaccgcatgaactaaatcaggaaactggatgctgtcctggatgaagaagatgggtatattgttgccgaccaggtcgtagttgccttcctggctgtaaaacctgaggaatgcacgtcgggagaagggtaagagagtccaggacagaccgagatgtgacgggattcttccggacttgagcctatgcctctcattctagcgagcttcagcagcttacctgacggcaaaaccgcggacgtcacgaacggaatcggcacttcccctagagccttgaacggtactaaacctcacgaaaatcggggtctcctgcgtggtatcggtaaaaagcttcgccctcgtgagttcgggtatagccgtatgaagcctgaaggtcccgtgagcggcagcgcctctagcatgcaccacacgctctggagcggcaggcgatagaaattgagtataggcaaggggtgagcagcagaagagaatggcacgaagggcagtcgcgtaagaccgatattcagctggcgctctgcttcctgcaatcgggcgatagctctggttttcatgactaacctggaatcctctcgtgatcaaacttggatacctgaagttcgacattgcggttgatgagatgcggaaaatccgaggtcaatttcaacatgcgtcggagcttaccttctctcgggcatgaaaatcgttcatgatcgtaggtccacgagctcctgcgtggatgctcttgtcagtagcctatgcgtaagcgagtaactagacttcagcggtcgttctctcccatagcggttcccctcatagcgcatcgacttacgtccatcttggtaccccagtaagtcgtaagcggggtcttttcggtgttctccactgagtactgcttgagctgacgttgcttagcatcgccaaccgatgcgtgtatgactatataccaaaagaaaaccttgcgaggtcggcgaattcaagactgtgaccaccttgtcaatcattgctcacctttctcggcagcgccgtttacggtatctttgacagcctgcataatatgctcggagatcactacgattttcacacgtatctaagatctgtctaggaaagatcagacgaggatatgctgggaggagagagtcttctaccctgaccggaacggcgggtctcgtactagagccgaggtcttatatatctccttagcttctgactgtgatatctatgccaaagatttccctgccaacgccgcgctttcagttaccgctcattcgttgtgcggcgtgaggtggagggagaacgccgagtacgtcactttatgaccgacgccattccagctcagggcatcactcgcgtcgacgggaacccgtaccagacgcggcgcggctttgagcctactggaatttagcgggactagtcgcctccaccctggttagatcttgcattctggcccagtgaatacccgatttcactttcatggggtactattgagggagttcgctgcaagcactagggatgatgaaccattggctaggcgtggttgttgagggcatgacatgttgcttctctcgtaatgttcccagccttacaacagtcggtccattgctctgatcccacgggtcgtaacaaaccggaagcatagtctacaccgagtcgtccgaaagtgaatgctacgctacttgagtatacgacatataattgctcacccttggtatactttaacgatggtcacgcgccaactttgttgaattgacctttcgatctgttcgcttgaggtatatcgacacgccttatacggctagattagtgacataggtcctgtcctaatatcgatgaggacttcctcaaggtttgaaggcacagagcagcgttgaggcactgtttaagcaacgttttaatgagcaaagatgagctgcgcttgcaacgggtactgccccgtctttgcggttgccaagaacgatcagacctagaactacaatacggtagataacggagaaagatgtgctcttcggaaacgtccaagcggaagtcggatgcggaagagcgattatggcagaggaacgggtcattagacgtcggaatagaagaagccacgggcagtgcgttctgcatcacgccgagtcaagttatcaatgaacgtgttaaggtggtcattgagcttcggaacaaccggttcgatggccctgaaggtagaggccagcgagaaaagaaccttaggctggataaaaaggtcggagccctgaagagacccggcctcgagagatcaactttatgaaacattaggcctgcccagcgatagtccaggaacctcatcggagtcgcaaggccgagaccagacagccgtaaccgggagtatttactgaaacacgagtcgtctccaattcggtatcacaaccgagatgtccatattgtcgctcatttacaaccaagtcgagagggagaccgtatatcaccgggtctgcaagtaataggcagcgagcgctagaagaagcgcgatcaacaccgccgcaatcatcatagtagctagtggtgtaaaacgactcagttgcagtatcccgttgactgatgcgatcccaagaccgtctgaactcacagctgccgaagctcgccgggatgacgatcagcctgacggtgttatccgctccggcactggcgagcaggttgccagacgggttgaaagccagcgctgtgatcgcaaatgaatgagcatgcaagatcttgagtaatggctgagaacggaaagcaggtggaatcatggataagttgaaacccgggcttcgcagacatctatattcatgtctcaccgccaatgtccgagcgtcgagtagcccgatagaatagtctgcggcagcgtacgccaacaccatgccgtccgcgctatccacacccatgggctctaccatcagctgcgtttctgccgcacaggggagccagccctgactgacctgatttcaaaagcactgacaggcacgttgcccacttctctctttcccaccatttcccactgttcctccttttccttctcggcgccgggcacatccgcgagaccaaagttgacacagtaacccttcttcaagacggtgggtcgtttccctttaccgcgagggagcggcttggggttcgtgttgatgattgcatggatcataggcgtcgataagacctgtcgattgaacctagcatgtgaacaggctaggggtaagcggcccggtggatcgtcagcattgacataatggactaacttggccgaacggaacgccaccggatcggaacccagggtaggcaatggtatcgaggcagccttctcaataccctctttcgacccgttcgaggctgagcctaggcggaagacgttgatggtagtcgtggtggtgacagccagctaggccatacaatgttcgcgtcagcaccattcgccatttcttacctctcgcgccaagaatgcgactcacaattgagctatcggctccaaagtcgatgtcgaccagttctccgtcagccttgctgcccgttgactcccacttccagacggatagcatctcgggatacgtcaacaagctgacggtcgactgcgtcccgtcgatatcggtcgtcccaacggcgaggaggtcgaggttaggagagaaagccgtaaatttctgcaagcagcaaggcgatcacgttagatggctggattggattgttggaacagctcgaacgtgcctgatacgggtaatcgtcgttccagggtaccgtgatggtttgcgtcgacttgaccaactccagcctgagaatgaaaggagattcagcctatgaggagatgcagagatccatacaagatcgcgattacttgtgattggcgtatgagaaagcccgacagtgctcattgccttgaccaggcgagccagctgctttggttgatgtctctgttgcgttgactccgacgaccacttgttttttctgaagtagacgaggtaaatagagcgttagctgagaaagatctgctagtatgcgatagtattgcccaatactacccaaggagacatacctctacgttgattgccatagacgtcgggaggtcctcgccaggttcaaagatgtgctccgtcacatctgacagcgaccgaccatccggagaagcggtgcatattttctgaagtgccagggtggagctcatattgagtcagactgccatcgaccaattgtacgataaagactaaccagcttgttcttgatcccggttctactaggtccaccaccaccacctaggagcaaggtcgtgtcgtcggtaaatccgagacaggacacggggaacgacggtgtcggatgagctcggtgcttagtgcgcgtcattttcagtttagattcaagattattcgaaagggatactgagcaatgttggtggtatgttgtcggggctaaaacggtagtgaaccagttacaattgcaattaatcacttgctacttgaggctaactgaaccattcgtttggatatggcgacctctcgccgagtcgggaccggaagtttgtcggaagcaaattatgttgatcgaggtgagttgcctagactagactcttgctaatcgaccttggaatttggacttgttgacattttcatgaccactcgctatcgagtagatacattacatcagtcctggcatcactagacaatcaaggttctgaccaggatagctggactacgatcgatgttcgggccacgggattgggactagaattcttaacggcaaaacaggtcatcctataccgagtcaactaggagatgacagcttgagcgctgtgtttgatagccagctcgtccacataggcccgtccgatgcaggcagacgattaatgcgtttccaaccgactggtaagtctatcttttccggcggtcatgattctgcggtacgtcgacactaagcgatccgctgatctctgatcatggcgtattacagattcgctctgatatcaaagacttccggtgaccctgcttgataaagagcctccaggtctagctaaagccatcggatcatcgggtcgaacctctcacgtccccggctccacgagcggggtcttctggaaggacatcatgctaaaggcaaacggtgatggctcgatgacgctgctccctatcatatcgccatccgtatcgagtccgtccaatagtcaacatgaaaaatctttcagtcaaggcgacgaaacgatggtagagaaccacgccacgttttacgataaggaggacgtcttttctcgacatagtggcacgatggaaaagtgctatacaacccagtcatcgccattatcttcagccccacctccgagtcgcccagtcagccagatcttggcgcctattgacattgagccacctctcgaaccgctacctgttctccccctgctccattacttggctcacagcgtctcgacgacgcaaaaaagccggcttctccgactgctccttttatcgccggacgagcgagctatggcgttgaaaaaagaacccgacctgctagatcttctccgatggcgttcatctcacccaccaacgaacgagcacatcgagtccaggatcaatcacctcgactatctcgccttgcaactgctgctgactgcttaccgacaggaagaagagaggctgagcacaaaagagcaggttcaactgggagtcgacatcggcaagctcggactggagatgttgacctgcctacagatcgatgccgagaaggtggcaaaagcaagatcgcccccgagatttgcctcgccgtcgacgtctgacaagctccaccctggaggcgatgatcgccgcaagctgaaaaaggtcttggccggcgacatctcccttggacgggcgccggcctcgccttgccccgcctcgcctctcaccaagaataccaaatcgaatgtacctctctcacgccgtacctcgagctccaggttcgatctgtatgaaacgccaggaaagaaggacctgttcagaaaagtgggatcaccgctggcggacgaaaaggtggatccgaagcagctggaaacgagtaatctgataaaggaaatcgaaggggttttgacgacgtgtgtgagtggtacacggtctctatcctgtcacggtcatttgatgtacgttgttgcccagatcaacgctggcgcgaaaagcagctctcctggaattcgtagtggggtactagaattgacaatgttgaggtcacggcttgacgtgatacaggtgggtcctgctgcgcggctcaagtcctcatctgatactgatacgctggtggtttgtcgatagggtggaacgaactacggtatcaagatgttgcagaagctgatcgactctatcgagaacgagtgagtctggcttcagacttgacccggctgatggaggcttaacgctatggatagtccaacacaacaacatatgtattaccgagctatgttgctactggcagggtgggagagcgaatcgaaccaggatctcatgcctgccatcaacacattacaagcgcttgtcgtaagcatacgcctgcaatcaaggcgactcatcagtgatggtactgacttgctggcttctcagaaaaacgcccgaaaaagccggaatgattacgtggcgttggtcgcaagtctagcaaaattccgtatcatcatggcaaactcctacttggatatcgctgccgacgccttggacgaggtcaaagcgttactgactatcagccaggtgatatgtcggcccgaagatgccgacgcgctcgatctttccagcttacaacccgtcatagcggtgatgctggcacaattcctgatcctggcggtccctttcgaaacgagacgaggcaaatttcaaacgtcctcagaatacctgatcttactccaccaactgatggaccgatcaatcgcgcttaacgaagacgctcacaccgctaccggccgtttgaaggtcagttgtcgcgttcagttacgttacgcacacaaccacccgctgatctggtacatattctgtactctaaagatcccccttggcactttcgagtctcctgcatctcccgcctttgtggtggagactaccccggcaagcgtacttttccaggttacctatctcatatcatgtattggtcaggcggacgtcatggggaacaagccgaagcgattgatttacggatccgaaggactgtctggactcacttttgcctgcaattccatggccaaccaccttcagcaaccatcgaccttgggactgtcccatgcactatcgatcaagcgagaactccaaaccgttcacgccgagttactgctggaccttgccgggctttacatcttttcagccaccttcaagcaagccgaagatgtaagtgattgtattcttggttactcgctcgtttcgcttacactttcgatcttcctagacactatacaaagcgattgcccacctacgggccctcgaactgtttgatacctacgctcctcggatatgtctccttcaggcccagcgataccacatgctcggtcacagggatcgagcggttgcgtactatgaagcttgtcaatatatcagcaatccgggaagcgagattcacttggttgccagaacaagcttgctgttgtttcaacttgccggacgaggagcagacgacaccggcaccagaggctcgcagatcaacgagatcaagggcgagttgcatgctacgcagagcgttctctacgtgtcgaccgcaaagatgcttgaagccgtcaccaccgagtcgattcagagatccaagtgagtgtctgccatctggttctctttgcggcaacgtcagctgatggagtctattccgaaggaaacttttggggatgggattacaaggcgccatcgctgccaataataaccaaatgcgtatgctcttcctcgccgtggcttcttcacactaccgggacaccatgcaagattcgtgcatctcgatgctcaagaccgcgtcgaccatcgctaggaagctgggggtcatgcagtctggcaaggagggcgaaaagttggaaaagttgggaccgaccggtctaggtaagtcgaaggcatcgcgcggtcgccgcgatgagcatctggctagagcttatcgaagatcgattcgcagggttatgggtcgcccagaggattggtaagtttgggcgttgcggtcgtttggacacgttgatgaagctgatatcggttcgcgcctacagcgtcaatgacggcgagaaccgagcccgagacggcggtgaaaaacctagaacgtcagtgggagactctgtcgacaatctgcacattaccacgcagtaagctaacctcctgacgactcgttcttgcaggagtcaagaaatacctcgagaagagggagctcgaggccacgatgacatgatcacacgacagcatcacctaaggctgaggccagctttcagaacctagatctatctacaagcaatcaggccaggacggcaggagatcataggtcatcttcgatttacggactgattcgactttttttttacgatgcctcgatttttcgttttttatttaccttacgacgaccgtgttagttggtcatgatttggcggcacgtagatgcccttgacgatagttgtatgagcttagtggagcatatccactgaatcaatttgaccggtctctgagaccgcctctgacatgaaccgattattggttgcaaatgatccggtcgccactggtgacgcggcaagcacggcccggagaatgcgtttcacatttcgtccgctctcaactcgttcacatcaccaggtctgcctttcgaattggttatcatgacgttcaaagctcgaaagtttttcgctacaagatgaccacatctgcttgttactaagacagctcgatcaaacgcaaagtccgtcgccattcctttactatgatcttttgttcctttgcttcggatctacgccatcagttttgatcactgatcgctaattgattccgtgattgattgatgagattgatcgaaacaatccatcagaaacaacaaaagtagaatcggctcggcagatgataaagcgtcatgttgacgtttacttgacaagaccacaactccatgtatgtcatacccaactgatctttaggcaacctcgacctcatcagcacgaactacactacatctgccagtcactctatcctacctgataggtataccacatgtagctggaggaacaaacaacaggaccgccacgatgcatcaccttcgttttgccggtactcttcccgacgtcgacaatatcgagctaggtcatcaatacgagcgactcttcgaacccggaccatcgcgcatcaccaagccattacctacgaggaagaagcagcctttgcgggagagcaagcactgggcctctggggcacccgagcaagaaacggtcgagatcgagaaggagagaggggaaaccaccggacatcgaaagaaagggtcccagaatgtcccgattgttcctcgtcagttcaaagcttgtccaggatgcttaccctgtcgaaaatccggttgagaagaaactcccattgaatcctccaaagaaacgcccagccagattgccaaatccatcgtcctccgatgtgacccatgtaagcatcgccggacgacctgcagtgagtttgcccacccgctccccctgcccctcctgcatgtcatcctgacacagcgactgatcgtcacgacacatatcgccccgtcagtcaccccggaaggttccaagcgctgtacgtgttgcatcaagaaaggcacacagtgtatatatggtaaaccgatcgaccccaaggaaaggtcgagggggaaaaagtacgctctgcgtaaatgagggggttgaccgggattgacagccatacgaggcgaatcacgggatctacacaagatgagacgagaaggagtcgctgaattgcaacgcagcagccgtgaatgtgaaattggtatcgtttgcgttatcttagacatgtacaaaaaatcaaacactcaagagtcgacagactttacaaaacctcttgatcgtatatacaaacaacagaacgcgaccgattccggcgggtgcctctcgacgggacgagctcaggcggcccagactcgttcttccacccattccaggtcgtcttcggctgtactcggggtgaagaccgacccagtctcggtaaggaccggcatcctccaagcgtcctgctcctctgtggacccgacgtcactggcggcgtccgagtggaaggatgaagcgtacgaggtggagagcggtgtgacgttccccggcgtggtggacaggctagaaagatccatcaaggacgacgagacatagctcgattgcgagctcgtctcggaaaagaccccgtgcgactcgtcctcctcgccgctgaacgtgatcgatccgggcgaatggggtacagagtagatgtaccaccaccccctgcccgtgtcggtctgatcctgtcgaacgagggcttccacgcccgcttcgctccatccacggaagactagcctcaaggcctcgggttccccagcggagacggacggggcatcggtgtcgtgtacatcggggcaggagaagacgacctcgacgtcgacggcatcttccgtccgtagccacccgccctcttccgagctgagagtgacgagctttccgagtttgtctagtatggggaagagccgcgttcgggcgtgctgatcatatgcctgttgcgtgggcaagagggagagcatgagatccggcgtcgggtgtgccgtatacgggtccgataatgacgagggagacgatttaagttccttgtcagggagggagagaaggtgggagagcgagggcgcgagggggagcaagagataggccgtccggttcttatccctggccgggactgaggccttcttggtaagagtgacctcggcgacgcagggcacaggtgcaacgggctcggcgagctcaaagtactttttaaactcttccgccctcttcgcctggttatcctgcgccgtcgaactcttgacgattccgaaccggctgaccccgtggatcctctcgtactttctcaagctcgcatgaaccttgccctcggtcgcgccgatcctcttccttcggggagccttggatcgggttttgccatctccttgcctcttgatccgatcggctagggctctcatccctagaggcacgttggcgtagacctcgtgtgcaaacttgcctccgtacgtggcaaacgtcctcgctggcgatgggttgagacccatgtggctgatcatcgacggtcctctcaagggctgagaagtcggtcggatccttcctgccaggaacctgctcgattggacgagcggggacgtcctcgtcgtcgattgatgatattccctatactgccctggccatttcctacctccaatctccctgccccgtctgagcgggatggtctcatagaccggttccctctctagatgcccaaacgtgctcctccatacgtccctggcgaactgtttggcctcttcataaggcttggacgaggtaggtcgggaaagcgacgagggttgtctacgggcttgtcgggtgagttgtttgaggaatggtttgagaagacgggaggtcaggcctcccggtagtgcacccatgattggatatagggtgaagatgggtgtctagcttgtgttctagactgttgtgctgagtgtttttttaggttgggtggtcgatatggtagttgatcgatgacagttgactctctgtatatacgacttgggtggcgatcggctccactctcccgcgggatcatccatcatcatcgtctcggcaacaaaacccggcaaaggaaccacttgatgggcaaattcgatggaccacgatcgcaaaaccactcgaccgctcgcttcaacgatcactcccctttgctcctgctcctcatcacttctcatccgattaggagcaaccagaccatgacactcggtaagatagcaaaaagacctgttggttgagcgtatggatgaccctttcgatggtgacatgccggatcatttgcttccggatactcacatcggtcggcgatgtcagtcaaaatggatatcttggctttgacagtgatgtctcattcaagtctactcgaccacgttacacgattagagacacaatgttactaccgtaggtacaacgttccactgtgcatgttcgcagactgtgcgggatcccgtttgctcttgtcctgtaatctatctgtcatgcagcctgatcgccaatgagacccacgcttccacttacctagtgatcgctggtcagtcacgtgatttcgtgagatccatgactaaggtcatgacaacgatcgaagggggtcaatcgtcatcgattaacacgatgatatataatagcccaaagcccacctcgtcttgtcaaggatcgttcattcacgtcaacgactttgccattcacactcacacattcgtatgaacacgtcctccctccggctgttcaatcatctcaaacctactctccgaaccgcttccctgcctacccgcgcgttcttccactctacgaccatcacgagaagcaagatgtccaccaactctgagaagaaagacttcaagcccaactgggcggccgaggatgggagcttcaagcgtcaggttagctccttcagggacgttatcgagaagggcggcaagtttgagccggagaaaggtgagtctgtcgagaagtcgggtcttcgattgcgagttttgaggtcctttgaaggaaagtaggctgattcgctgactcacggagacaggccgttaccacctctacgtctgtaacgcctggtgagccaaaatgatcgacgtcgaagccgactagtgtcatgttgaatcttatctgcttctcatctcagtccctgggctcatcgaaccttgatcgtccgcaagctcaagggcctggacgagtttttcggtgagtcctccatgcgtcctttccttgaggcccctctgcggtttcctatgagaccagacttactcatacctatccacctccgtccaccctcctttcatttccacttactgctcgtgtagacgtatccaccgtccacccggacatgctcgagaacggctggaaattcgccatccccggtggaaaagtccccgaagaggatttcgagaacgcgaccgaggacaagttgttcgggagcaagtacatcaaggatgtttatttcaaggcggatcctggtgagtttgggcgcggggttgtacgagcagggcaggggaggaggctgattttcgatgttttctgtatgcgatgcgggacagagtacaacgctcggttcactggtaggtcgatagacggcgtttgcactgcgaatactgcgatcaagtgttgatggctacacattgttgactcgcacagttcccgttgtttgggacaccaagaacaacacgatcgtcagcaacgagtcgagcgagattattcgattcttcaacactgtcagtccgacccggtcttcaacgtgcatgccataagtatcatttgctaatctccagaagatgcgtcccggtcgatatgacaggctttcaacgaacaactccccaaagaaaaggccgagctcgatttgtaccccgagcacttgaaaaaggagatcgacgaattgaacgaatgggtacgctgtcgctcgtctgtttcgattcgaaaatcaaacgaccactgacatatatcttgaaatgacagatctacccccagatcaacaacggagtctaccgctccggtttcgcctccgaggtcaagccgtacaccgaggccgtcacccagcttttcgagggcttggacaggctcgaaaagatcttgagcgacgggagggaattcatcgtaggaggacagttgaccgaggtcgatgttagaacttatacgaccatcgctaggttcgatatcgtctaccatggacagtgagtcggcgatcgggacaggcggcaacgggtgagatgccatccgctaaagaaacacgtgcttttcttctcttttcgcgcgatccgctctgcctacagcttcaagtgcaacttgggatccagtacgttgtccttttcgcgatttgacacgcagcaccctcgctgactatgttttcgccacagtccgacacgactacccttccatcaaccgatggttcaagaacctctactggaacaacccggcctttaaggacacgaccgactttgagacgagcaagaggcactactacttttcccaccgccagatcaacgggtcggggatcgtgcctctcggacccaagtaccccgtcgagcctctatgagagacggtgggatccggctctacgccggcgtgttgcttgtcggaaagaaaggcgttggattataggtcaagctcgaaattcagtaggcattttatgtacctgtacttttcagaagcgcagtaatttgaatgaaagatgatagtatgatttcggtcggtcggaattcctctcgttgctgaacagagggcagatgtcacgtgactgccacacgatagtgaaacgcggatcatctcgtctcattgttctccgtgttcgagcttccgatcaagaaacgatcacgctctcgggaaacatagctacatctcgcgaccggaacatccacaattgacattaaaacttgtactcaagcgccatacctccgcaaacagcctgctgtgtagaatgtgtttcagctcgcaagccagaatgcttaaagtacgttcatcgcagatccagtcgcagcgatcatgacaactgataggctccatctcgacagatctcggaatggaaacccgcgtcggcacgaatcgctgtcgggtccttgccggctctcgagaagattcacgacgggactctgcctgcactaggagttcgcttgtgcagtaagccatgtcactggggaaaccggagccgattagcaagcttgccggaaggtcttgcacatcacacgattggcgaggattagcctggttaggagacggccttctttgtctatatgccattgaggtccttgcgaagcgttatcccggagcgagcacgtccgcactaggggtgagctaagctggatccctcagctgaacctcgactaacgtgataatatttggcaccatctagcccatgaagaatagccttgtcacgaatgccacaatctcgcaccttgcctatggtctgcgcactctggagaagccctgtcacgcgcagtccggtacgatttgtccggaaggtaaaggacaaaaagctgccgcagagtctttcgaagtctacctgggcgccctttaccatgacgcacacgagccttatctcgtacgggattgggtggagaaactctggtcggcgacagtatttccggacttcgaccagcaggtcaagaagatttctcaggtgaccgcagccgaccggaaaagacatgcagccgtcgtcctcaacgggagcacaaaggaacatatgccatgtgggcatgaacaggccgtgcgagtcccggaactcgccgtccaacaggttacaaagctggtcccaaagaaaccgatcaaaaaggagttgcagattaaattagagcccagaggtcaagaggagcctacaaaaaaagaaaatgttgaagttggccaaacaggcaaatccggaaaggcaggggcgatcaagcaggaggcagaaaccaagcgagaaggccagtaggattgcctctgagcaatgtttagccagtcttagcgagtcgtaagtaccagttctgatgcgccttactccagagtgatcaaaatatctcaaacctgtaggccctcctaaaaaatgtttccggaatctgggctgtccaagcgcccggtcttcgggcctgaccgatgtgcacaaggccagagagtgatttacatatgggatttctacacgcgaaattggtgatcgtaaatcctctcatctgagggtgttcctagtcccggtgtatatgcgcatgaatggagcggatatcttgccgtaagatgtgactgatgactgctgcgtcatataatgcgtcctatctcctccaagcactgtcgggcgtctcaatccattcccacaagtcttcttctgccggtctgagactgctcagaatccgcttgtagtcctcctccacgttcttgtaagtctcggctagcttttctcttcgctcttcgggcgtaatttgggcgaggatctcgtaattgaatcggaacagtctctccttgacctacgagcgagcgagtatcaggtccgcgctgaaagtttttggcctcgccaaagccaaggctcacctgaagacgatacgctttatatcgctccttgctcgtattcgactttagccgttctaacagcaacatctcgatcaaccgcaggaattgtctctgtttcgagcgagacgctgtcaattgcggtgccgtcaccgtagatccggagggtagttacgtaccgtggcatatttcccttctgtcctgatcttttccaaccacttcttgtcaagcggcgctcccttggccatctccttcgagtccttcaattgctctttcagcctaaccagatcgcatcgatcccgcaaatcttcgaacgcctcggacggatcttctaccgtcagttcggcaaccttttctagcgtcaaagcatagtcgtaaagagcgttgtacagttgcgctgagagaaattacttcggcttcagtggcgctgaaacaaatgaggtaatcggtctaactcacagccgtggccttgaccttggaacggcggcaatatcacgaattgactgacaatccaaagtcgttagctattacattcgtctacgccgttatgcttgatagcgaaactcacctcagcctcatccgtaccatatccgggtagcaccagaatgggtaggcggaaacgtatcccgcaaaatgatagctagcccctgtaggtgcggtatcatgtggtcggatctcgaacctgcaagtcgtacccgaaaaaagagtcggaatgtcagtagtcatttgcaaggatgggtgggtactgcacaaagacatacagtaacaggaactcccactgatcctcatcttcctgcaatagccgtacgcgaaagacggattgtcagctctctcgattccaactagttgtgaggatcgtccgtaacggacctggatataacttcctccttcaatgtagagcaagatgaacaactgtgctcttcggtgaaactccctgaatcccggtgtgtcccatttgcactgccaacccgtaaatctcacattagcaacaacttctcctgtcaggatatcacgcatcgaaaccctgagaggcttacatgccagatcccatactcgacgtcgtcttcctcgtcatctgctgagcggtaagaagcgatcttcttgccgggcgggacaaaggattcggcgtccttggctacggtatcggcgaaagtttcggcagactttgtataatctacaggacacgcatagtctgtcatcagctcctaaaggtaacgtgtggataaagacacgaatgttcgagcttaccggtgggcacaaacttgaagagcgtgccttcaacgtcgtccgcttgactatcgagcttttcgtcataggtgacattaaggtactgcttcaagctaccagacgccatgttgacctgacgttacgttctcagtatctttcccaaatgtaaatcttccaagacgagacgacgatgctcacctcgatctgcagattcttgtacccatagatcttctccttctcgccaaagatggggtaggtaaacgtcgggttgaaaggcaacaacgccctagcttctgggtcttcgtcaatgacctcgagagcatcttgagcggatcgaactgtaacaacgacaaggccgaagcgtgaggtcagtttatcaagtcatttcgacgtcgttcttagataggacaccacaaagggtaggtagtcttcgagggcgagtcgactcacccagtgtcacgctcaacgccttgttggaatccaccgtccactcgtgcaattcttccatgaccatctttcaatacggcgatgtgagtaccttttgatatatctacttgatcgagaccgataagaactccgaggtgtcattgagagcgagaagataaagattcaagtcgacaactcgctgaagatgtcaccctcttggtcctgtgttcaccagaaacgcgtcgcgtccacgcgtcgatatcccattccttagcttgcaattaggcggaagcaaattcatagtcaggtattctatgactgttggcaaatcgtgacgtacattgggaaatcaatgagatcaaggagcaggttatacaggggtatgggattgaatttcaaggttagcagtggcggctaaagcgaaaaatgcgtcgcataaagaggaagtgcggtttcgcaaagtgtcgaagtcgagcgcgaggtcgtgtactcaagctcccaagactccagcaactcgggaccgcttagcttattattctcctcggacaagaccctccaggtcctgacatacttgttgccctcgtacccccacaaatccccggcagagttccaatcggaccagactcgatgacctgcccgccgtctattagtcctcggctcgagatttttaatccgagctaggactcaccgaaggcaaacttgtatgggttagggaagctgccgccgcgctcgcctttcacctaatcggcgtacttattggcccagtctatcaggatactgaccttgaaactgcaaacatggcaatccttccgatcagacaccgtcgcgctgagtatctaattcacgacttcgactcactctccaccataccatttatccaagcgctttgaagcatggtcttcattgccagagtatcgtacaatcttcatagcaaagctatcagaagtcacatagtccttgtcggtgctattcttcatgtcccttttccgggcgagaccgcacttgtcagcgagcgtagaacgattcatgtcgagaccactgcttacgagagcacaagatagacatcttctgcggtctctgctcgcatatcgtaatagaagaccgcctgggtaatggtagtattgaattctgacatttccgtcccgattaccttttcgtcggaaaggggtgcgatgccaatgggtcgaaggtagtccaggttacccttcttatcggtcgcctccttccggaattgagagattcttcccttgatgtcgttgtaatacagcgcgagggcacagttggcaccctcattgcctcggtcaaggatgtcgcgaacgctttctataccgtcgttgaacaagcttgcatgggaagctcgccaaaaggtcccgtccttgcgactggccttcatcgcttgtaggtcgtagttcgcatcgtgcttttgtttatactgttgaacttccagatagtcctcgaacttgagccaatcaaggatagggtcgacttcgaaattcgctgccgggcaaatttccatccctcgacccatgaatgactaccaggtcgagcgaatccttccaactgtatatctgcgtcaatcctcaattagtacgacattgtcatgcatgtaactcacggtgtgagtttgaggagaagaccggctttttgagatcgtcatacttgtagctttgtgctttgaggcgactttgaggcgattacaacgcattggacatcaggtggattgccgtgcaggttgtcactactcgagtatcatgatagaccatggctttccgataaactccccaacgaaccggtccgcctcacaaacagatatctgtacgggtaggtaaaagccatgcaactatcgactattcgtacatgggagggggatcgagcgctgaccaagctaacaacgacaaacacgcttctagtccggcgaacttttgcccttcccggtgatcagaccttaagcgctcgacgctccagcatctccagggcgcattataccagattgtcgatactggataagggcctccagcgcataccgtcttccctcttttcgtatccccagaagttttgcgcgttgttccattgggaccataccatatcacctagtcattcgaccggttactgtagaaagctatggaggggtccatagagaacggacttaccaaaatggaatttgtaagggttggggaaaggcttcggcctatcagatacagcgctggcgatgtactgcttcagccagccctccaggtctgccacaccgaacctagcatgttgcgtataacgatcagaagacgcgcaaatcacagccattgggagacttactcggcgccccaaagctcattaagctttgtaccttcatccactcccggtgtaccaaaagactggattagatgcgtcgcaaaggcttcaaaatcgacgtagtcctctgcggtatcgttcttcatgttactgaagacgaacggtgtcatcaatttagcaccgtgtacgctgactcgtatggggggcggcaggtggattgaaaatttacttacgagaatatcagatatgcatcgtcttcaacttcgcggtctacgttgacataaatcagagcgctggccacccacgggtcagtgtcggagtattgggccggagtaagtttacaaatcggggcaattgccaccggtttcgtatagtcgttcatatccgtctgattgttttcttgggctttatgctggtcaaagcgggccttcattccgtcatgatagaaagcgagggcgcagttcgagtcttctggcagaccgtcgaaaagcttttctacgcggctaattgttcccgggctttcttcgcggaacaggctggcttcggcgggataccaaaatgtaccgcccttcctaccgtctatcatggtggaagcgttatacgtcgattcattttcttgccggaatttctgagcgccgaggtaatcttgaaaaaaagtccatactgggctcgcaccgccgtacaatccgttcgagtcgtctcctggagggtgcatatcaggatgatcaggtgctgcgactatgtccaaggcgttcgccatattgcacgaattgagcaagccgagaatgatcaaagctttagcaaaaaacattgtgcgagtagtaatattagtgtatttgtttggcaaagctttttgcataaatgtccaccaacgaaacagcgaccttgtcctcttgggattgtgcgcaactcaaagtccggcatgatggaagtgaaacatatttgactttgaaacaccgggaattgggtagccctaagcggatttcgcgaacaaaggatgatggaaaccgaaactcgagcacgagcgcaatgacgaacgtaacgctcgcctcaattgatgactgagatacggaaaggcctggtgtaggtgtactcgtcaaagtcgacgaaggtcttcaccacaaaatggccgtttttcgcgccagatatcggcgaaagcagtatttggggtttgcttaaccctgcccttagatcggaaaagacaactattattggtaacctacagtgaggcgtttccaaaagggcccacttgaagtttctctttgattagcatgccgagcgacttcgaccctatagtacgttccagcaaatccaggagacatcctcacgattgagtggatgcagccgcgtaagtacactccactcatgggcgccggcgtcgagccacgacgcgcccactttttgacggtcccgccagcggatacggctcagtcggcatcttgcacaggtcccttcgcactttcgatctaaaaatggctggaatctaagagtcaggttgcagagaacaattggttttcttgcactgccatttaattgttaggcaatgttaccatgtttccggttccggacgatatggcaagcacgcgagagttgaacaccgcaacaaagatcgatctggtacaaccaagttgtcttccggcaaccaacaatatgctgccagaaaagtctgcgtatggtcatcgtgcttgaagctgctgattcatgcaccggagcccccaactagcgtttgcgccgttactcgatggccctgatcgtcgtaaccaaagaaatcgctggctgccaactgggaccaaatcttgtcacctatgtatatgtggacatgagtggcaattcgaggatgagcttggaaaattacacccacccttgcctagagtgtaagggttaggaaagcagcctggcttctcgcgtccatgtgcccaagtcatcgcccaaacaatcaactggccaggcatgaaactatggagtaagagggagatttagcgaggcgatgcctgatccggcatatgtataaattacttcgcagccacgtcgtcattcccttgctgcaccgaccacgactgagacctgaaggtaacgcagtcgggatcatcaattgggttttcgaaaccggcttgattggatggtcctgagaccctgagcataagcgaaaagggttagccttagaaccggttgacatcgtggtcttatatgattcgtacggcagtatcaggtatgcgtctcctttcggttcattgagcccacgtccgaagacgatggtcttgctatccgaagaggaagaggtcgggtagtctactggttgcggctgttctgtagcgttggaacaaattggcgcgatagccaagggatagacggggctaggccctgcgggatcttgcgcctccttgtatcgcgcgggcatgttgtcgtaatagatgactatggcacaaccgacgtcgggcatatcggccgtgcccttcaagccactttcaatgtcgagtccgggcgcgaacatagggtcccagaacaagctagagttccgtgccttcaggatctccgtaggaccctcacgtgcgatgctttctgtgagagtaggccacttgatatcggtgcgcatccgctcgtctgccggagcagcggtcactatgtgtagcgtcccgaacaacgaaacagccaacaaagtagaggctgagaacatgtcgctttaaaggtcaattgggtttgatggggtatcgtgcttgtatgtgataaagtgggatgtgtgcaagcctctaagatcatcgcgaaccgaacgaattgattgacactactgctgttgagctttattggcgctttccctagcgtccaaaagctgatacggtcggtcccttggaacgaaccctcagacggtcccccctatgattccctttgtcgaagggacagtcgagatttcgaaacgtgtagcatctcctggttaaaggaactcctgctccattcaagtgcccttgacgattgcctgcgctccctcatagagaccgagacccacaagtgatgacgtactcatgcgccttcgccgtcctcctctccgagcgtcgccagctgacctccggcggcgattaacttggcttcctttttggcacgggccgaagttttcagtttctcaaaccggtctttatatttctgtaaatgcgatcgctgcaggtttcacacgttgtaacgtgtaagcgcggaggcgtagattatcccgctactgtatcgacttaccgcccgttcgttctcggcttgcaaaaacttgacctgttcctccagatcgaccacacggcgttgctcagaatccaccggacgattgaacccggcaaagccgatgcgagaggaaggcatctgactgcgatatagttcttgactctgcatgaccttttgcgcttcggccttgacgccaaggacgacgctcttcatcatgccttcccgctccttgactcgcttgagctcttgttccacctgcatggagtgtttcgagagcgcgtccaggctagcacgtaggtgctcattctccaaggccagctcttcgggagtctttcctccagcaggctttttgtgtacaacttcaaacgaatcggcgcttgatgaagaggtgggctccggaacgatggtttcatcctctctgccttttcctttcgactttttccccacccgctgtacttcaagcggtgcagcggcgaaagctaccgggtttgagatctgatcaaacgcggtttccaggacggcccagaaacgggcaaacgggtcggacgattccagctgaaaacggtccaggcgatcgaatccggaatcagtgtcaaccgggaacgatcgatcgactacgagcaggtacgtaccggatgcccaaatttgacaaacgagtcccccgtcccgccccgctccgacgaactgctggaagcgtacattgtcgatcccggtcctgagcgtgtcccgctcgccagcccagggtcgatcacgctcggtcgttctttcaacctcgaatcgatcgatgacaaggccgggctggagcccgatgcgggatgagagacatgactcgcggtgtttgatgcaactgccgggatagatggaatcggtcttgcgaatgggagtgccggggaaaaggtatgagccggagctgacataatgggttggccaagcgacgtaaggacacattgtgatgctaaaccacgaacgagtctcctcacctgtcgtaccgctgtggcctgcatctattaccccactcgtcctcctcctcctttgtctatcatgcgtcgtcgaggcatccaattctttagcagtgttgctccccgcagctttcgggctccgggcgatagtcgccctccgagcgagatccttggcctttttccggttctgtgcggctaggagcgtcaaggtcgccacggcctagatgacatcccgatgatcgagagagtcagtttactgaagacatccggatagtctggatgcggctttacccccgagtctgaggcatccttcttgacctgctcaaacaggtcagccgcctcggcatacagttcagaagctcgggagagactgtcggccgtggccgagatctgggccgtctgtgaagcctttgcggacaaggcgtgggcctttgaagaagacgcgagcgtcagattaagaatgaagaacgaagtgcttgtcttttgctccggatgaagcttaccctgttgatcggactgttggcgtccttcgaggcgctcatgctgctcgaccggaaggctggcgagcgatccgaggcggtagagcaatgaaccgccggcgttgacgtacacgcggggtccgattatccgctcggttggtgactcgagacaatgactcgagataatgaccggcatgtatagttgacgctaacaaaacgaatggaatgcgtcaagaagaaaggctagcgtcgatggcgtgacatggatgagaacgagacgatatcgagttgacaagctcgggcgaggtcgagtgctggttcggtcgactccggttcgatggtcacgtgacgaccgccaaagagcagagtgtcgtcacaggtcgattcgctgcagaggatgcacactgggcagacattgtgtcactgcaacaacagcaccaggagcagatttttccggagcgcaagatggcttgctattgtacttatccgccactcatagaggaggccagtggatatatatgtgatcaagctgcatcgatctgccggtggttatttaacggcgagagcattggtcatgaccagagagcacaagatagaccgtcccatacgacctcactgccccgccgtcggagcatcaaagatggtcttccaatccccccactctcctggccccgatggccctctcacccgcaactcgatattctcgcaagactccccaccaaaggctccagaggctttccaactcgccagcgcttgtgccgggaacgggcctgtaccgcgatgggggaggtgcaatcggatcagcacgggaatcctgacaaaagacgaattcagactttggacggctgggctcaccgaaagtctccctctcgatcggtcgttgagccggaggaagcttgtccaagtacaccctcgagaaccgatactcgaacgccctgatatccaccttgatgggttccggcgccttggcaggctctgccgggagcatcctctggagagattcgcgggtcatgctgtacacgtctaggtggccgagcgaggtaaggtcggagatgagggtggacaggcgtgcaaaggggttttcgggaaggtggtccggggagctaagtcgaggtgattcgataaagatgggtcgtcagtgtgagatacgagacggtcgagacggtcatggtcgggactcactcgtccacctgcatctcgttggcgcctggatgacctccctgaaggatagccttcctctccctctgcttttccgcccaggtcaatttcttcttctttttgctgtccccctcgtcgtctccaccctcaacgacctttttcctctgcctttccagctcttgcccgaccctctgcaagccctctagcactgtctcgccccgttcgaggaggacgatcatctccctcatcagcctctcctccttttccttcctcccgccgttggtcctctcctcctgttcctttgcctcacgttcgagttcgatccgttcctgctccctctttgccctcctagctttcctcaccgccgcccggtcggtcccctcgagccaccgatcgtactgttcgttcggatcccgatcgttgacgctataactctcgccgtccgccgtcatccgtccttcgccgagctcggaacgcatgttgaacgccgtcaactcggcagccataggtccgtctagtcctttgccctcgttagctttcctggcttcttcctccgagtcgtattcgtcgtccaggtcgagacgacgtttccccgcggccttgtcatcgtcatcatcgtcgtcgtcgtcatcatccttttcgccgacatagttgccctttttccgtccgaaatcttgcccctcgatatccgtcaggctgaggaacttttcccccttgtctttggcctttccatcgtcgtcgccagcagcgtcctcgtcgctggctccgaacatgtcttcatcctcgtcatcctcgccttccttgcccttgccctttcccttgccctttttcctcgaagggacgacaccttctccctcctcatccgtagagtccgattcataccccgaggtatctttgagggaacgacgatccttgttccgagcgctcggggtatcaaggtcgtcctgcaagaaatcggtcgacgtttccgcgagtctcgagggggatgcgaaacgggtccgtttggacggtccgtcgtcggcgtgggcacgtttggacattgaggtccgatttgattcgaggtggtgtggtgtggtgatgttgtttgatcgtgtatgaggatggggtagctgatagacagcatgagtcaagtacgactgtgtgtgtcgtgaccctgatctttgtgctgctcacctcgtcgtcactaggaagtcttcgtattaggtaagcacaccattcatccgacgatgacggcattcacacggcatcatcaccgaatttacttccgtctcctctcccagccctgctcgttccaatttgcttccgctctcccccctcgacgtcatggacgatccattcactcccacaatgagcaacgacgggggacgagtgagtgaacctgaccctctttgatattcatctacatcgtcgtcgtcgtaatgtctgtcctcataccctcgactgatatcgacatcccacatagtaatcaaccgaggacatcgcactcgccatgccttcttcatacgacccacccatggacgccacgggcatcatcacacaggaagagatgcaccgatcgatgatgctcgttaggcttcagatcgccaccccgctcagtctcttgatgaccatcgggtccaacctcgtctgcgcactcgccgtcaaaccgggtctcggtgagtcaatcctccctgtctatcgggtcgtccgtccttgcgtttccttgtccgactgacatgatatggtcatctaccacccccgcctcacagccgagatcaacaagcaatacccgaccctcttgagccccaacgctatcctcctcggactctactggatcgtcgtctatgcgctgcaaatcggattctgcttgatcctcgtcaccgccaggaaggatgagaccaaggtgggtcaggtcgggccgggcctatgcagataccgtcgtcgagcgtgtcgctgatcctgcctcgaatccgcatgtcgctcttcctcgtctcgccctgccttgactctgctccgccatccttgtcttacatacctccttctggacgtccgacttgcctcacgtagaacaccctcgtccacggagtcgggctccgattcgccatcgccaactggctgcaagccgcatgggccgtcgcctgggtgagtggactctaccgggcgtgccattctcttcgaatgcatgggggtggaaatcgggtcatgcccgtgctaatcctgtttacgccttgacgggtctgggacaccgaggacagactttgaaattcttcatggtctcggagattatcgtcatcctgaacgtgctcaacttgtgcgtcctgttgccgagcagactgccaagaggatagaaatggatactgaccacgactccctgtcacggacccacgcagggcttctatccaactcaccctcctctcgcacccttcatccccccgtcaccgcccgctcgacaccctctttatccacgcacccatgaccctcttcttcgtcatcctcttcaccctcgactggttgcacaacggtttcatcgcgctcaactggctctccctccctgacctcaaagacccgtacgccaagacgtggcaagccgtcctcgccctcttcctcgtacacggcgccctggccgtctgggtggctctcaggctcgacttttgggcgaccttgggcgggatgtggaccttgctcatcgtcctcctcgggaatcagaggaaacctaccccagaggtcgtcaccatcgtcatcctgctcgtcttgcaccccgtcgccctcgtcggtgggctcgcttggaaaaagaccaaggagagggaaggaaggatcaggttggaggaagaggcgggggcgggtatggtcccttacgacgaggccgacgagtaggtggtaaagataccgagctctcgtctagagggagatcggccgtttgccggtcggtccggcgcttttgcgttaaataccaggagttgatcatcgtaggaagaggatcgacaagtgtagtagaatctcgatttcgttcacatgcccggttggtcgcctattttcaatcaaaaaagttgcttgagaatagacgtgtgcgctgtccctgcggctgtcgttgcctaggatcgtgctcccttcactgccctcatcgtccagactgatgccgcaaatgagcctacaatcacttgtaccccttttgaaccgatgggcacggtccagatccgggtgagacgactgtctcctcagacaattgcggctcaatctgccatcatgcgcgcctcttgggatcgcaccctcgggacacgagtccagatttcgcaatagttcgcacggcaacatcgagactagacagggccgggtccgcgtggataaactgtaggggcaaggcgtaccctcatatcgggttggattttcccactttttcgagtccgtttctccacgccctttcaaacgcccatggtcggtttgagtggattcctgctcatattgccctcaaaccgggcctcatcaggaccgtccccgtccttgtcggtctgaaatcctcatatccatttacttgttagactcgttcttcaccacccttccgcccttgcagcgagatgactgataggccaactttctgactgcttattcaggaaggacagatgggacggattggcagcatcgctccatcagccaagctgatgggaagaatgcgaagggttcgtagaggaaatgacaagcgcaaagccacgaaccgtgtgcgcccagcacgacggctaggagaacagccgggacgatgtcttgagacgaccactgcggcgatggctaattagagcagcaggctgtcgagccgcaataacaggaaccgccgagactgccgcagaatcgaggcagacgacgtagtgcttacggtcatcccttcaccatctatcagtcaaggccgcggtaagtcagactgatgttcggatatcaaagggttccgtaaaggtgccgttggagttgatgattaggcgcgtctatctacggaggacctgaaattaactttgtcgttatggaattggggagatgggcttgaacgaagtagacgcggcattggatcgtctaggcaagacctttttcgtattggacagttgaaccagaacctatttctcagtggagccttcaagacaggcattcatgtggtcactggtatccgtcgtcaaaaaagaatttctgaaatgcacttgattttgcgctggcgcagtcgcaaggagatattgtttgttcggccaatgcaggaaggccgactcgagtcctgctcaagattacatgcacagatgtctggcgaggcgccactgcgtctcgagtatacgtccgttaagcacgattgtacattggggggcgcatcaagacggaacatttagcctcgaagaccgctagtcgcatggtctttcccagcctgcgctttcctgcaaggcccattcgctctacgaaaagcccatcatgttcgtctacagaattggtggccgcaaattgtaagagcatactaatcaaagggttccttgcttgaacgacaatctcgaacagggtgtggacgtttcagacaaatccgattgacgctgtatatggatcgactctgcgaggtggtaggataagcattgtctacagcgaaagctcaagccgatcataggtcgactcatcgggaaacgccacctcgcttgtcctgtaatcaccgtgaagccaacacctcccctgatcgccacccacgaccaacaaaccgtgcctgacgagacgcgagactctaacaccaaatgaaatctcaatcgtacaacaaccgattccgggcagctctgtgcaacaatgcgacggtaatacatataaccaattgggccactctgatttgtctcatagaccgggacatccgtctacaaagccgtccctcgttcaaagttggctcggatcctacgagcacaaaggggacgcgcaaatcgaatcagcggcatcgaacacgacgactgctgtgacagagggactgactcggtggtgtacttgtcaaagtaccggttgatcttgcggttgaacaccttgttggcgtcattaatgtaggtgacatcgccaccgtcgtcgtcggcggcctttcttttacgcatcttcttgtgcctcttgtccatgctatgagacgtggggttcatggtcagtcatgcgtcagtatccgggtgatgagcgagggcgaagatacggggcgacggaagggggttcgggcactcactcgtcgttcatcttgcccacgactcgatcgatggcatcgtcgctcgccttgttatcgccataactgagcgtgttcccatccctatacagatcctccatcgcgcccaacgccctgttcgtcgaagccttgatgacggaggaagcgctccccttggccccgacggggacgatggtactcggagcgagaccgagggcggtctctttctgacggttataggccgcgaggtcgggtttgagtttacgcgtgtctttgttgtagacccgttgggcgttggaatctcggtctggagaaggcgcactcgggattagcgacacggccgggggatgctacgtgcagggacacggggggtgaagtgagactcgccatcaaactcgatcgtgcccctttcctgcttgtcctgttcggcctgcagccacttttggttctgttcgatactccagccccaattcttctttctcccgacgtccaccccgttctcatcggcgtcaatcttttccctcaagttgtcggctagtttcttctgcttctccagccgggcgatctctcggtgtgtcgtcttttgtttctgatggtcttcaatcagggatttccggttggcctgtgtggattggttctatcgtcgcgcgaagataccggatcaggtatgtcattgcgagacacggtcgagaggagggctcaccatcctcgtccgtagttctttcaacttggccagcctctcttccggggagacttttttcccctgcccttgttcctgctctggctcttgctcctcgacgacgacatcctccacctcctcggcgatcgcctttgcctttcctttccccttggcatcccccgacgtcctcgtcgtcctcgtcatcttggtctcctgctcctcttgctcgggctgtacctcgatcccggtctcttggacagccttgtccaaagtctcctgagccttgtccgactgcaagtttgagagaggagccggggaaggggcggtagatttactcgatcgggtcgttcgcggcatatcttgaaaggctgcctggggtgagactgtatggtgtgggtggtggtgcgtcgggtttggggagatggggaggtcgtggtcggatcgtgatcttcatcatcatcatcatcatcatcgtcgtcggtcgagacctgcctagaccgagctgagcgtcgaacgcattcaaggtggaaacagcgatcatcatcagatcttatcaaacaacagacaccggctgcgacgcgacaaagaccacgatgacgtgtgttagaagatagaactcccggtcgatcatccgcttccatgtggctcggtaaatacttccgaaacttcgacgatcacggctcgcgtcgatcctgcccggtcgtggctcccgccgagcccgccgacccatcgtctcgcgtgcctgaacccttcccccgcgctccaactgattccgacgaacgtgcgtgtctttgaaacgtttcttctaccaagagttttgagacgtccaagactcgaaggacatggatcaaacggaaagttgcaggctcgtcatggatgtgggaagagctgtgacatgtgatcggagctcggcatcttaacacccgccggctgaagcaggggagatgtatttgtagaacccaggggctatctttgggatgggtgtgggcgcaatatgatcatcatcgcatcaaaattcgtcgaaattcatcgtaaatcgatccatatcctcttttccactcgttcggcggattcgtcatcccccggctcaactacactactacgacggcgatgataatgatggctagtgactaccagctacagcagctaccagagatgaatcggcttgagcgatcacatcgttgccgctcggtcgatcagaaaacagcacgcacgttggaatcgaccgcgacatctcgaatacgttctttgaaaccccaaccatcgtccccaccaccaacgtactctaccacagagagtagcagcagacgcaagcctgttgtgcatgtgtgtggtgcattggggaggggagggagcggggcggtaataatcgtgcgccgggcatgaccgttccccccggttgtgaggcacgctcctccccctcctcggttgtgagtggccggcgcgcgtggaacccgggggcggcgatttttagttttctggcccaaaaaactaggcgacctcgttggagaggcagcaaatgggacccgcctatataaatatatatataggccagaggctggggacatccacaacgatcagggacaggccgaggatcatcctagttcagaggtccaagcacgatcactccacatcgatcatccatcatccaccatggactcgtcctcgtcgagccagaccgacaacaacgtccccatgtcccatctcgcccccgggcaacacgccaaactcccctccaactctcacgaagattttactacgagcaacaacctccccgctgccaagttggacaagatcgagaaccctgcgaattacgctcaatcgacgggtgaacgtatcgacccgactcaccctctgtgggaggaactagcaccctcggactcgtacatcgatggtgtctactgggccgacctcccccgtgctcaacgcacgaggtgggctttgaaacagagcaacgaagaggccagacgagagttgaaagagttggggaggatgtccaagcaggaccccttgtcccccgtcgctgggtactttaggtgagcccggcactttcgtcgacgtccccctcggggactttttctgctcgaacgcacgtcgctgaatcccgcgcctttttttcgttccaggcgatacgtcttgaacgggttcggactgttcaccgagggttacaccttgttctcgatcggaaacctgaccccgctcttcaaggccgtctggcccgactgttggagccgacacacgacgtgcgacaagaactggatcgctgctgtgagttgtcactcgggtcgccgacgacgcatgaaactctgtggctgacttccttcccccctcccccctttccttgccgtcctctagcaaacctacctccaaatcatcggaatcatggtcggccaggtcgtcgtcggtttcgagggagactggatcggccgcaagtttggactcgtccaggacgccttgatcatgttcctcgggttggtcatgttgaccgccatgtggggaacctccctgagcggatggacgatcatgtacgcctggagcttgttcatctacggaatcggagtcggtggagagtgagtttatatcagagccgtcccatgtccgagcatcgacagcgaaggaaggcgatgctgacaaccgagtcgactgcagatacccgatgacctcgacgacggcgctcgagtacaaggccaagggcggtggtcgagcgatcaacagccgggacgacaagttgcacagaggtcgaaacgtcgtgctcgcctttttgatgcaaggttggggtcaattcttcaaccaggccgtcttgatcatcctcctcttgtgcttccaccacgggtccggtaaccctccttactcggccgtctctgcccaatggactttcagggttcagttcgggatcatggccctgcccaccctctggttggcttactaccgtttctacaagctcaagtacaccagcgctgccttgatgcgaagcaagaagaacgccagggtcaaccagtcgggttacgacgtcaagtcgctcaagctcgtctttagccactttggaggtcgtctcttcgccacggcgtttgcctggttcgccaacgatttcggattctacggtaacaagctcttccaatcgtcctttatcaaggtcatcagccccggtaacaactcggtcatcgtcggatggaactggaacttgctcaactgtggagtcgggctctgcgggtactacacctcggccctcctcatcgaccacaagctcgtcggcaggaaacgtctccagatcgtcgggttcatcgccaactttatcctcttcctcgtcccggccatcctgtttgacacgctccagaccccggcgcacatccatgcgttccaggccatctactttttgtcgtcctttttccaacaaggacccaactgtaccacctttttggtcgccgccgagatcttccccatcgccacccgagccaccgcacatgggttttcggccgccatgggaaagctcggtgctttgcttcccgccatcatctacaactatatcggtaagtccgctcgctggcgtcacgacgtggcatctcgaattcaagctcacctccgtcccgcgttcccgcaatcatagacgccaggacctcgttctggatcgtcaactggttctgtctcgccggtgccatcggtacctggatcttcctgcccgacaccaccggtctcgacatgcaggagcaagagcgttactgggcctacgtccgagccggtcgggccgccgagtactgcggaatcgccgttcaccctcgacacttgtccgtctgggagcgcgtcgtcctcaagcgtcatctcgcttacgacgccgacctcgaccggatggccaagatggccgagctcagggccgagtaccaggtcgccatggcccgtcttcacgacgagggtgagatcgtcaacgccgaaatggtcgaggaggacgacgccgccttgtccggcgaggccaacgcttactttgctcgtaagtctctcgaccgagtcacgtgcgtcacaaccagagactgatcctgctatccacctcatccccctcaggtgaaaagaagcaagtgctatagattcgataagtgccatatgtgtacaacgtgatgtgatttgtagatgcgatcaccagaataattcccgcgctacattgcttccacacggacggtctcgtcagagagcaacgcagtgactttgcctcagagggcatatagggaataatgaataggccatttggtcacccatccagggtctgcaaatacctacagcttcactgtcgtaggctcaagcagattacaaggtatacagctggtatgcgatcagagctgagacttctagtaccttttttcaaaggcgatctctaaaggctaagtttaaggcgaataatgcttttggcgctccatcgattctgatgttcgcagcggtgaccggtccggatgatgcatctcctaggcagaagtcaaaagagttcgtacccgaaaatctatcgcaacagctcaagtcatctcttcgggccgcttggcaacctgctcagctgctgatggggttggtagagtaagtgatccctagaaccttatgcgacgactgcgttttgtaacttgccaagatctgggctagtggcaaatacttcgcgtttcgcagtttcgtcggcggaaatagcacgaatgcgcgcagctcggggacttcgcagattcgccggcgagaaaaatcagttcgctctatcagataaaaagagcctcaatctgatagagacagccgagttgttggagcagcatgcgatccactgactttctcagacaacacgtcgtaatacgttccccaatgtcttccgagccgacctgccgagaagagcttacgactcaacaggacgagaagaaaatcccccttgatgacgatcatgagagcggtactcggaccatcaccgacagagacttgcgacgattgtaccgcaaagtcgacctggtaatcctacccgtcatttggttgtgtcaaggggttcagcaagcagacaagctagggctagcgactcaggcgacgtgagtcacgtgtactgagcgtcaatctgcgcgacatgatgtttgacaagtcttggatgcgtgaaagtatgggcttgcgaagggatacgcatctagtcgggcagcaattcccctatctaaacactatattcgtaggcatcgcgcttctgggctttttttcgtcgagatgtcagtttactgagcttagaatgcattcagttcgtggcatttctcgtctgtcaatgggtgagcagagatcgctaccagtctacattgataccctccctcaaagccaacgttgagcttggtcagcccgctcaatacctgctacaacgaggatctccgcgcatcgtgataactttggctgtgttgttcacgggaataatggtgctatgcgtcgcctttgcgaaaaattgggccggattgatggtgagtagggttcgattgtgcaatacgagagccttcgccgacattcgatgtgattcgcataggtaatccgagccgttcaaggagccatcgaatgtgctatccagtcagtactatcggttcttttagctttcagttcgcggctgaatacgctgattccaatagacccgggatttgtaagtatcggtctcggtgcttgggagagcaaggcagatctgacagatggtcgccgttttgggaaatgaacccaaagtgctggttatcggaagcatttatacgaggcagatggtgagtacggacttgtatcccaaacactgcgagtctcgctcatgggtcggcatgtgaaacagcacgtcacgcgcagtctggtctggggatccgccaatgctagcttcaacattttcgtagactgggtcatgtgagtaaagtaagcgggtgcgaccctgactgtgcacccggattaaggtcccctctggtctcaaggtatgggattggtaaagccgccgacgcccactcagatggtctcgctgcctggaaagggtaagtcctgcgtggggttcggtgttacactcacctagacgctcatgcgaatgcgtacagtatcgccttcttcttgggaggattcaccattctgctgtccgttgttgtatactttactctcggggtgtctagcgaactgagatggctgagtcaagaggacaaagcaacgatcaaggactgcctagaggcagaaaagctgcaaggtcaagaacggcaccgcacctgggatcgagacgaggccatccgggccctgaaagatcctcagacgcacttcttctggctggcgaccatgctgagcgcaatgccatcgacagtcattacgacctttgggcgtgggttgaagccttgagtcaagcttgaagaaatttccacttatatggacaatcggtgtttatcaggattgatctataagtcgtttggcttcacgtctttggaggtacgtcacgacactggattcctcacacccgctttgctcatccaagcagtatataggtcctggccaaagggacgattccccgacacgtgctgtcgatcttctggttcatcactgttggtgtcatttgtcataaaaagaaaaacttccgcctcgtgatggcaatcgcagggtgagagtctaatttgagctattcgagctgtcaacattcctgatcgctcctctgttcaggctcttgcctggttttgccggcttgcttgtggtcggcctgctgcctgctaccccctcaaaccaatggcccaaatgggttgggttgatgatctcggttacgaccgtgcccagcagcttcttggtttggacgcttatcccgtccaacgtcaccaaccctacaaggaagacggttactagctccttaacgttcatagcattgtgttgtgagtggtcaacccgccaaaagtcactatggcagtgaagctgattatcaatcactacgtctgttttatcatcgtagtgggtagcatcagtaagtcaggttattatcaaccagacggcgctataccagctcaaccaaaagagtacagtcggatcgcaaatccccagagcacaagatgcgccaacgtatctacctgcggtcatcgcatgcagcgccatcatcggagcggaaatcgtactgttcgttggtatgcgattctattacattcgagccaacaagcgcttggccagtcaaatgactagcgaggcttcagcgtaagtgcaggcgtccattcagaagaaactcatggttgactggacggagtcctggtcacagcgttccttacgtatactaagacggtcaaggcaacctgcgtagcggccgaaatggatcttatgctgtcaattcatacagtacaagatacacaaaaaagtctagcccgagagcaacaatgtaacaacaagagtgcatacagaagaaatcatcattttgaagcgacttgtgctatacccgaggtcaggctccatcgcacgctcgaagcagcgcttcgacctcctccccaccctccatcagtaatccctccatatccaccgtgtcgtcgtcaaaggagtcgttcccggtgtcgatcgcatcacatgtagtgctcgccaatgtggagctagatgtagacgtagatgtgttgttggaattgagatgtctggatcgatcagcgagaggctgtggtgggggtctctgagggacgtgggcgctggcaggaatctttgtcgcgaatcctgtgacgccagaccgatcgatcgatgaatcggatcgcttgcgctgcgactcgacatccatcgagttttgatcctgaaccacaggtctcctctgcatcatcgttggcgccttgaaaggttgatacaggcgaggtgccaatggaattacctcagcattgtccttgcctacccgagttacaagcgaatctccaccgcctggagagctagccccgatgctgcgtcctcgggtgatgccaccgcctctgagaccgcaaggcttgactcccccggcccaagactgctgggatgatcgtttctctggcgaccggaaggctgatggatgatctggcgattgagcggcggtattggatgggaactctgagatgataggaagagatcgggtcggttgaagagcagtctttcgagcttcgatattggtaggtgaccgggagcgaggttcttcggagctacctcgcgcggccgcttcgggtcgattgggatcatcatcccgatacggtcgtcgcatttgttgttcccgtctatatgatactcctttatcgaaagcctgccgacgcatctgctcgtttgccttttgcgcaatctccatgctcctctgacgttgagcgcgtcgctcaatgcgcgaggccgaattcgcttgcacaaggttgagcaacagctcgagccgagtcgaacttgccgtcgaggatgaggctgaagtcgaggtactgagcgtcgaacgacctggcgattcttcgtccgtctgacccgcattcgaggcttgagcggtatgcgtcgtgctcggatgtggatatggctccgctaacgctctggaatcacccaaatgcggcgatccagacgttcgattggaaaatccagatgaaccagatcgatgccgtctcgtgttcctccgacccaatcctaggctggagcatgatccagacggactttcgagctgttgggctcgcgacacaagagctttagctgatgttgtcgattgggtaggtggtgcagggaggtcgtgaactatatgaggcggatttagtcgagactctgaatcgagttcctgagcagtcgatacgtacctctcgcccgagctgccagcaatgccaagcgtacgttctcatcctctggaggacaccaaatgatgcgtccagcttcctgctcctccggttccatctcgaaatcgtccatcgtcaaggtgaagatcaaggtcgagcctaaaatatatcggacggtcggagattgggagatgaatctccgaccgtacaggcgtgtagtatataaccggctagagtaccggaaatgatcatgtacaagtcagtttagcttgatcgacgaattgtatacctatcgataccttggtagttgtcgacgaccaggtcgcgtctcgccgatcggtcgatcacgtgatatgaactggttcaggtggtcagcgttggatctgggcaagtcggatggacgacaatgctgcgaccaatgccaatcccttaccctgggggaaggtcttcctgaaccgcgttcacatcgtgtgaagatccctcggtattgggacggcatgtaacatgcaatagacaggaaatacacggaaaatcgcgacacatcttgtacaaagcacatcaggaagggcaacccactggccggaagaatcgcatttggtcccccttgctgcttcgtgtgtaagggcacctcccgctcttctcggctcgtcatcgtattgtcgttgaccagccgtcgatgagggatcccatgtggtactatctctatatgagtggcagcgccagctgttgtggtcctgtgatgacgactagcgaattttcgggacttgtcgtaaatgtcgaaacgaatcatcatactctacctcgtatccagtcttgtcgtgggtcgtcttcgttgtacgtctggcttcagctcggcttgaaaagggctgaaagtggttagactgcatcttttgcgatcgggatcgcaagctgtacgtctcgcaaaaagtcctcgaccgcctggactttcgcctgggctgagccttggatatcaacgagtttggcggcagaattgctcgtgggtgcgctggatgagctggcgacagcgttctcgccgaccgtgtcgatcgatttattaccagccttcgtctttttttccttgacggcctttttcttcttcttgggtgcaatgttcttggtcggcgcataggttcggtcgaatacgtccgcagctgtcgcttgcaatgccgactgggcgggcgatgatgctggaatgacgatattgatcagttgaaggaggtcttcatctatagtgagggaaagcagagggtcaaagtgtcagcctttcaacggttatgggcaggagacagcttccgtaggcggctcgtgcgttccacaccaatcacacgtcaaccggataaaccagtcgtcgcggagatcagcacgtagcctcctggattgagccgctccaccccctatgatcgaagctgcctcacgagtcgggatgatatcccgagaaagatgaacgttgtcacagctggtgtccgagcagatgcctccttcgccttcgtataggcatatcgtagcttcgggtttcgttcgagcgattcttgtccagatgatgctgtccaagatcgaccgatcgagttggccgccggcatccaagaacgaaggtggagaactggcgattcttcgtctagtcttcatcttgaccgttttcgccatagcgacagggatcatgtttagaagcgacgtgtagggggtgaatctaggcgccttatctttctcactcaagatgaccgggtcgaagcggtctcttgcagaccggatcgcagtttgatcaacccgttcaatcgcgtgaccgtgtgagatgcactgctcgggctgaaacaatgaatttaaacaaatttcaagcctgacgggacgccacaggtggatttaccttttggtcgctgtcaggtgtttctacagcaggaccgtctgtcaaacggggcaacgcacatgtgcaaggcaagattaggcagcgctctcgatcgggtcataccgagtgaatccaacctaggaatagcggactcgagatttccaccgggctcgattgcacagcaatcatgtcaacatcttcgtcgacctccggccgaatacctccaggagcctgtgtcacaacatcggctgaaaggtcgatgatgccgtcctgggtcgtttctgatacgggcttatggttagcaacccggaaggacgatttgggcagttcactgaccagtggttcctgcagcactaccatctatcgagttctgcgcggtatcatgcgttgccgtgtcatacagctgtgtgacttgcagtaagtttgacccttgtgacatctgatcttggatgattgccgtttcggaagaggattccctcgtcatttgttctccatgtgatagtgcagtgccttcaggaacgacggaagtgactgtgatagtttgctggatcatggtcgcggtttgtcgtgtagagggtgatagtacctgcgccttcttggcttgtcgacgtgcttccatagcccggatcctggcttccagagcggctcgagcggcttctttcttctcaatttccttcctaagcgattcagtatgccgcttttcggcttcgagagcagccgctacggcacgcgttcgttccgacgtcatggtatcctcgtcatccgaatcgctgtcgaggtcaatgatgaacgacttgggatgggccggcgccaaggccttgcggcctcgattgaaggtcttggctcggacagggaagaattgagaagaatccgtcacgaccagagcctggttgtcgagttcgggcgtcttgggtagagccacttcgagggattgtagaggtgaagtggaggctggcttggccatgacaacagaaggaggtacaggggaacccgcatcggcaggcggagttgtcgataatgatggcgcttcgacaggcaaatcgatcacctccttcggctcgggagcggtcttggtcggttcggtagctatgtcggaggagatgttcgatatcagcccgggcttggctgtctatatcttatctcactcaccagcctgcaattttcgcaaccgttcgcgaatttccttctgcttgcgcaacttgtgcgccaacaatttggctcgcatgagagtaacatcactagctgatctggtctctgacatcgcttcaaagcccggcgttgatgatgattcgcgcgcaagactcgcttgttcagtagctagcccgttttgtggcatctgccctgtagcggaagtcgacgaggtttctggtccagacgggccaggcggtcgacgtgagaactcgttcgaagtgaccagcaagttggcaggatctgactgtaaggatgaatcgatcgcgataggttgcgattgaggtgaaggtgttgcgatttccatttcgatagacgatgcgatcgagtcccgacgcgagacatgatgaagtggaggagggggcggcgaggggggcggtgtcggaaggctaatcatcacgaaaccatccttccccttccccttccccttcccctcgccctgtgcgtcacttgtgaagaacgccacccaccagccgccttcgaccccacctggccaagcccgcactgccacgttctagtgttcggaagcggatgacgttgaaggggcaaaaagtcgccgccagggcccaagaccgcgcggcaacgaggcacgccatccatcatcgatcatggcatcaacaggaatgatgacgcggacgcaaaatatatttcggagaataatcccaacctcgacggccgggtcgtgacggtgatgctacgatgcccccgccttgttcgatgttgctcgaacgcacgaaccgcgttgacgggggcaatacgtctgcacacgtttcagaggacctccacccgttgccagttgatccggtaatgcgaaactttggctagaaatcgaccgttcgtgccatgggtccgtggtaatccccttcttatcggcatgcactataccgtgttcgtcgaccgagcatgtaggcgatacgaaccgagtcttttctgctgactgcttgcaagctcaccccatgtcgcgacttcaaacgtcgggcccctgggcggaagcggacaaacagccaagacggagacctcgaatgcaaagatctatacgatagccgaacaaggcaccgtcgtgctagtcttcagcaatcttcttcctcgacgatgttgacggaatagaacgactgttttcaggtctgactccgttagtcgtctcaacccccggctagcagacggcaacgtaaggcgaggcgcttgattacagttttgtcgacggggcgtccgtagagactggatgaccgtggaccgcaatcaatcgagcgtttcaggaagactccttacgaatccgcttaaatcctgtacgagcgagtactcgtagtagtccccctgaatcatcggcggcagaagcagattgtagccctgaacgttgtttgattgtgaggtccgacgtgataatcgcgtgtgattccagttctcttgttgtgatgaaaccctttgatgtttccggcggtatataggggccagcgtcaggcgtacatgtaggtcgatcatggactaacggatcagaagcaacattcaccaagaaattactagccactcgatcaccatccaaaatatgcctgtcgctattccgaacccgcctcagaccttggtcgcgaaagaccaaccggctgagattcccgaccgcgtcctgaaagaatttgctgctcttcgagatctgatcaaggcgcgcgatggtagttcggacccgtttgagttcgaggcgagtatcgactcccgactatcacatgtcgtgaaccatctgctgcgactgagatgtctccgttcaaaccaggtcgtccaagggtactttagacagtcagacccgtcgctcgtcaagttcagccctgaacaagtccttgaagccgagttgggcatgttggaaacgcacgatgaccgctgggagatgttcaagacggatattgcaggtcagtctgtcattcaactctaggcgcaggcgaggaagatgttgatccgctgtgcttcatatcagagctcaataagaatgcccccaagggaacctgctacacatgctcttctgcagtaagccgcccatgtgtctgtcgtacgtatggcgctgacgacaaagtgctgcgtttcatcttccgtcctagtgcgccacggacaaggcgatcacaagttggtcgtgacgaacaacgacccggacgcttggaaagccgcttatgccgagaagaacagcgctgcggatcccgaactgactgagctcggcgaagcgcaagccaaggcgagtgtttgtaatcctaacaccacctcgtgagagcacgactgagattgctatacgacacctaatttgcgattcaaaggcggtcggggcggcctggaaatttatcttggatcaaggggcacccaagcctgaaaagtccctcgtctccccactcgtcaggacgatcgaaacgatgaagatcgcttatggagacatgatcaacgaaaagaccaggccggtcgtcgtcgagacgagccaagaagtcttcagtgtacttccacagatggatccagttttgaagtaactgctttccggtgaaatagggccagagggaggtcttgttcggaaacacctgggatcaaaggcgcaccaaggtttgggagacgcacagctcgactctttccgccacacgagctgataacctgggatacgtgactggtagaccgagctcgcgggaaggtatccagtgatcgactttgaggaaggcttccctgagcaagattcctctcaaggagatcggtaagttatcttgctcacgctcctgccgctgtgctcatcgcttagtcgcagcgtttggactcgcagtgaaagaccaggattggaacgaaggaaacgccgatcgtttgaacaaagtctcggaagtgatgaacagtatcattaggacctgcccggagacctgtaggttgttttatggttcctcatacacgtcgtccttcggccggccatcctgctgatgaactcgctttatcttgcctcgcaacagacatcgcgatcacgggacacaggcgttgtcttaccgcgttgttcgccattctgcaccaccgtgacattcgtctggctcaaggagagatcatccctgctgtcatcaaggtgaccaaaaagcagcaggctggcgaggacaagtgagatagctagacggtgttcggtggcccgaagttgtcaacttgacccgagactcttcgaccttgaatccatctttgggccatcgaacgtcgagatctatagcacctgtactcttgcgatgcacaaacatcaatgccttgcagcattcgccgcactctcacccgtctgccctcacattagctctcattcaccgtcttctctgcccgaagatggtctcagccgcttcttcatccgccgtcgacagcgaaacctcgctcgtcgacaggttgaggtccatgttccccctgacctaccccgtacccactcctctcacccacccggagctcatccatcccacctcgatcattaccgaggaggacctctctgtcaactcggaaaatcttggagcatggctgcggtacatcaacgctgtgcgtgatcggatcaacaagacccgagcggtcgatgccgaggacgtctcggtcgaggggtcgttactgggtcccctcgccggacaagatactcgccgagctctgcaagagctgacgatgatctacgaacgagcgctatccatctttcccacctctttcaagctgtggaagctctacgtcaccatgcgtcaactgcacgtgctcggacctgtcaccgaagcggcttccaaggccaagaggcagaacgccgcccgaggtgcaaagaccaagacggacgtgaccgagtgtttggcgtttgccgaatcagagtatcagtgggaaggtggtctcgatggagtgattgggtacgaggagtggaagagcttgatcggaaccggagagcgtatgatcaggtgtttgcccaacgtgcgtacgctgtcccgagacgcagcgtgcagtcctctctggctgactagttgtccttttctattgatagctccctgctgtatggatgatgcacctctcttccttggtgcatccaaaatgtccagccgtattccagcggacctacgctcgacggacgtttgatcgcgcattgcggacgatgccgcctagcatgcacgctcgagtctggggtctgtacctaagatgggccgaacaggtcggcgggattgttggcgacagagtatggaggagactcttgaaggtgagaatcgagtttatgccaaacccacgggctcatacagactgacgctctttcctgaatctcccaggtcgacccatcccttaccgaacgacacatcacccacctcgtcaactctcaacccgaacgcccgttgcccgcagccaagtacctcctcgcgctcgctaggaaagctcaaaaaggcgactatgtgtcacaggaaggcaaatccgcctaccagctttttgtcgactttttggaactcgccgaaaactatgccgaagacgtcggtctcgaggcggatgagatgaaggccaaaaatgccgaagccgagcgggtcgagaaggagcaaaaggagcgcgaagaggagcgcaaggctgctgctggcaaggacggcgcgttgatgaggttcgaaggcgcacccgtccccatcgaagagttcaacgccaaaaaggcgcagcagcagaacacctcgaaatccatcgaggcgtacgaccctgacacggatcctgccaatgcggaccgcctggatattgagaagattgtcctgtccgatggtctgtcgatttacaaggatcaagcgggtcgactgtggtccggattggcgacgttctggatcaagcgaggcgactttgatcaagcttccgagacgtttgaaaagggtctttcgagtgtcgtcaccgtccgagactttacgcagatctttgacgcttatgccgaattctccgagacggtcatctcgacgctcatgacggcggtgtctgatcccgattccgaggaggatgacgagggtctggccgagatggaagaggagctcgacacgaggatgaagaactttgaagatttgatggacaggcgaccgttcctgatgaacgaggttttgctgagacgtaacccgaacgaggtcgttgagtgggaaaagcgagtcgctctgtatggcgatgacgacgaaaaggtaattcaggccgtgttcgtactggggatcgtgagcttccagctcacaaccttgtgccactgaatcgacaggtcgtcgagacctatacccaggccctggaaaccatcaaccctcgaaaagcggtaggaccgctgtacccggtttacgtcaactttgccaaattctacgaggaaggcgggtcaaaggacgcagagactggcgagcccaaaaacgagcccgacctcgaacaggctcggcaaatctttgaaaaggccacccgcgtacccttcaaggcggtggacgagcttgccgaagtctggtgcgagtttgccgagatggaacttcgagccgagtgagtcgaggtgatagcagtccgcatttcgcaagtaatgattcggtctcttgtcatggcaggaactacgaccaagctattcgcttgatgcagcgcgccactacccctcctcggaataccaaagtcaacttttacgacgatgtaagtctgatcgataagccgtttgtgcggactttcacttatgagctacatacacgactcactcagagcatcccggtgcaaactcgtctattcaaatctctgaaattgtggtctttctacgtcgatctggaagaatcgatcggctctgttgaggcgaccaaggccgtatatgacaagatcatggagctcaaaatcgccaatgcgcagacgatcatcaactatgcccaattcctcgaggagaacaagtactttgaagagagtttcaaggtaaatcgacggtcgagaatattcgcagcatgagagtgtcggcttaccttttactaccctcttgcaggtatacgagcgcggtatcgacctgtacaattacccggtagcatttgagatctggaacatctacctgtcgaaattcgtttcgcgctatgtgagtgacctagcgtggttgtcatcggaaaagatcgccattgataatctcgaatgcaccgtctacagggaggctccaagctggaacgagcacgagacctattcgagcaggccctggaaaagtgtccagagaagttctgtaaacccgtcttcctgatgtacgcccagctggaagaggagcatggtcttgccaagcgcgccatggggatctacgatcgtgctgcgactgctgtgcaagatgacgacaagatggaggtgagtccggatggtctgccaattcctgccagaacactagctcatagctgtcgactcgcgctagatgttcacggtctacatcgccaaggctgctgccaactttggtctcccggccacccgatccatttatcagcgggccatcgaggtcttgcccgacaggcagacggccgacatgtgtctacgattcgccgccctcgagcgaaagttgggagagatcgaccgggctcgtgccatctacgcccatgcttcccagttctgcgaccctcgaacgtataccgaattctggtcagaatggaacgctttcgagagtgagttaccgggaatccatcacaacgcgccacggagcgatgtctgacgtatgatacaaccttcactcatttcagtcgaccacggttcggaggataccttccgagagatgctccgtatcaagcgatctgtgcaggctgccttcaacacagagtgagtccttgtatccccacgagatgtggccgtgaatatgagctcactcctttgctctctctctctctctctctctctacagggcaagctacatcgctgctcaagcccaggctgctcgaaagggtatgcagaacaaagaggccgattcgacctcggcagatgcctccgatcctatggctgcgatcgagagagaaaacaatgctgcccgagctcctccagctggcggagctgccccgagctttgtcaagtcggtgcaatcgaacgtcaccatcaaggacgatgacgccgaggtcggaggtgccgtggtcaacccggatgcgatcgctatggatgacatggacgatgacagtgacgacgaggaataagaagatcgggtgatgccaatagcagtagcagggttagcagcagcagcagggagtcaatccgttgtaccagcatgcacctagatttcgattttttgtgcaaaaggtccaactgatcgatcggtttcgcgcgtccaaaaatgaatattgtcgcggaatcagtcgaccccgaccaacttgaacaaccgagatcttttgtcgactattgaattgcaagattaccaactgctgcccagccctcacctttgcttgccgcaccctcgttacctggcaagaggaatttggggtaaacaacatcgacccccgccccgtgtgctacggtgtctatgtggtcgataggtcttagatgtcgatcacggtcttcacctggagactcgctattgcgagcagcaagacttgccccaagacaaatagctcgttacgggactcaagcactgctagaggcttccactgatgagccggatggcgtgaaatactcttcaccggagcctcaacctgtctcgccgccactgacaaaaccgaaaggagataccgccccaccgcacctgccgctgcctcctccccttccatattcgcccacctcgaaaccctttctccgacatgtccaaatactggatcaatccatcttgtctagatccgccgatcactcttgggagatcttcaatggtctccatcctgacctctaccctgctatcccacgaggaacgatgtcgaatctcctgcaatgccagggccaggaaagacgacgggcagggcggttcgtcagactacgtcagctactcggcctgattcacgagcacaaaattcgcctgcgttccagcgagcttgagcaggcggtgatgaccatgtttgaagctgcgcaggagacgatggacaaccacgagaccttcgagatggcaatgagcttgctttgcgagaccgcgggtggacgcccggaattagtcaatcaagccgtacgcctggcttggctcgaaaaggcttatcgttggcagcacatacaagcttccaagtcgacacccgatgtccaggaacttcaaaacaagatgttgacgtggatgcggatacaagcggacaggggttacttgaaagggctagccttgccggccgagtatctcaccccaggaggacgcagtcgtctgatcggctcagtgctcgaaccggccctcgagtttctcggtgatgttctgcaaaacgatttggcttgtgtggaagcagccgctcagacaatgatcgaggcacatcttttgggacgagcaggatccctgaatttggggatcaagcgaggcaaccgaggcatcgaagggttcgtccgtagagccagggatgctggtcgaggcgaggctgccgtgcgtatctggagcaaggcgtatgcctcggtgacgggcggagcaccagccgtagcttcgttgatggaaatgccccccgacttggtcctactcgatgtcgaccgcgactttgcgcaagctcaaaagacgttacaacggagcctagcccacaaaagcgcctatcgcctgcatcaactcgggggtatcagagagacacttgcagcttcatcactcttgatcgacgagcttgtggctagcggatctactctcgatcaatcattcgcccgagccctctttcgactcgtccgggatgggccattcaagcctaaagtcgaccccggctttgtcgacatcaagaaagcggtgatctacatcttccgcaggcttgctgtctccaacgagctcgtccgcatgccggaccggatacaaggggaggggttgaaagcgctcctacgcttctcgtcgagaccttccgatgttgatctattcgcccacgtctaccgacagatggcccctcgtgacggccagaagcgatcttggaaatgggcgtcaagctcgcaaaagcagttctcagaactcgtcgacagtgcaatcgacaagcacacgcattcatcaatcttgctagcggtcgagctgtatgcgcactggttgtcggacgagttgcctccctttagaccgagtgtttgcgagcgtatcgtgcgtgcattggcccagatcgacgacgagaacaccgcagggcactttcgcggtctccatcgagggcctcacgctctagctggccgcgccgtgatggtcgatctcttccgtcgagcgattgcagacactggatctgagcgcgtgtcccggatatatgcgcaaatcatcgtcgagcacgactcgagaaaggtcggccgaaccaaggggaatgggatcacattgaacgagggaatcaacggagcagactcaacacagtaaaaatgaactgttcactttgtcgcattgcatatatatacagcctactcctgattacgagattttcatcacatgacgaacctgacgatttgatattatgaccggtggtggaccaacagtcctgctttccttgaacgcacgatcacggtgatactagctcgggacgttgaggagctactgctatacatccagagaataaacccggtctcgtatttcaaaacgaggaagatttaaaaggcaagggtgcgctcagcggtttaaaggccattcatagtgatttagagcgactcgactcgtctacaacttgtcttgatgttccttccattctcgcacccacgacttgacaaactcgatctccttgtgatggacctgacgaatcctctttggctctttgctagggttggccagaccgttctcatcgaaatgatggacagcatcgtcaatgagaatgacgggcttgtccaacgtagactttcgtttgatagcatagtccgattggggggtggccggacgccaaggatcagaatctccatcactgtgcaaagtgaagacgatcagttcgctctgcgtttacatggctcctgtgccggcttacatgaaagccagtcgagacgcttcgatagcaaagtcgcccctagcgttgactctctcgacgtcgggcttgccagggtgaggcagtctaaagtgttcgcctggtggatacgcgacgtggcataccttggaggtgaattctaggtcaaggctacgttgtggacgtcagcaggattcggggcgtgtcagttcagactgtcactgacaatttcgagatgatacgtttgccctcgagaggagcaggcataaagtacccccagttctcacacactgtccgatgcggatgggtcagtctacaaaggcgtctcacgatgactccgttcctgcgctcaccttgaaacagccaaagtcgccatttctgatcgatacccgtttccttataaggttcagggtcgaagctaccgaaacactgcgaggtacagcccgtcagtaccgcagtagacacgttgttgtggactagactgacctgttcgacgtccggtttaccgtccttttccaaggggcaagactcctcgaccatctcgcggacgtatttcgcatactggtagatggagacgggaaccttcaagggtcccatacggaggggcaattcgagaccacctagactagcgattttcttggacggctgtccggtgaggacgtcacagaacctgtaaaactcgtcagatcccactaaacgaacaaaagtaggccaggtcagctggctgttcaacgtgctggagaggacgatcccgcctaccctttgggtcccagttcctgccttgccaaccacccagcacgctagccaggacatccccgaagtcttgtacatgttccaggtcttccaagccgaaccaaccctgtaccgtccgcctccatttcccaccttgcaattcgagcagctgatcgatcgtctcgaccgcatcctccaatgtgcgcatacactcatccagcgcccacgtctggatggcctgaaagtagtcggggaaagacgtctgcgcatgggtgaccgcggacgaggcgatcccaccccataccaagcctttgtgaggtcgaggggtcgatccactagaaatgttgatcgagatccgggaatgttcgccgagggtgacgttctcgtatctcctaggtaggcgggtcggatcgagtgcgatgatggcaggatgcgggggaggcattcgatcgagcatggtcccgttatcgtatccccagcccttgagcaaaaaggccgtcatcgcaccggcatagctccctccgtaccagatccacggtctgacttcgttgctcatctgctccctgtcgaggtgtttgtcgaggtgtgagaggtcgagtccctgaatcagccgtgccgagtccatcaacgcttgctccgaggtgaggaagcgcaagtcgtcggtcgagaggctgaatggctcgccggaagggtacgaggtgttgggcagcgatttgccatagtatcggtgttccaagacgatcccgataccgccagtcgcattggtcaaaatttcgaggatacctgatagaggcgggtagagaccgttcagctacgtcgcacgagtccaccgagcatgcccggactcggactcgacgaacctgtgtctaggaaaggcagcctgttggccccagaggtctctccaccatcaaggacgtagacgggcgaatctttctgctccttgttccagtgcttgagactaacccagtaccgctggcagaacgtgacgttgttcttgggatcatagtgatcgagcggctggtcaaagcaatacgactgataatgcaggtgtcgatgatcctgccattctggctgtcctttgccaaacgtcaagaccttttggtcctcgtgatctccagcatagaggtcaggcgtgaaagagtgctgtcgatgctgttgaatcgtctgccagagcttgatctgaggtcttgccgagtgtaacaaccggacgtcttcatcgtacgtcgtgtaggctgttgtcgacgcggtcaacaagaccacagctccggtgatcgataacagagattgaccacgcatgatcaaactgattatgccctagtggatctactgaagcgagtcaacagtgacaaaatgatgcagagcgtctgcatatatcatgacactacctctatgctgtgggtgtccacatgcgacctgatgacactagtacttggccttatccgaaatcggatcggtcatctccgggcgagcaacatccatcctagagtttactcgaccaactcttcacatccgcgaatatgcatcacaccagaatagcttcaacgaccacttctgctgccaaatgttcgcctacctcaacaacaacttgacgatcaaactgtcgcacagttgctcgaggacaacaagaatcgacgaccgatcaaactcggttcgggaatgtgaatcatgtcatgacatcaaaagactgcgaattattccgtttcatttccgggccaccgggacgtcgatttttccttacttcctatccggcatcatcgtcgacattgaatttatgtaatctagtatcgagaacaagaaaaaagccaaacttgcaattagccagacgaaacatcactccccatccgtcgccgtgacgactcacgacggtaggctcctttcggccggtcaaggcctcgagcctgctgatcttcaaggcgacctcgatcaggggttgcaatcccttggcagtctccatcgggtactcttccgggttcttgctgtacttttcgacgtagagcctgacggtggcgccctgacttccggttccgctcaatcggaagatgatcctgctgccgtcctcaaacttgatgtacagaccctggttcttcgagaccgagtggtcgatagggtcggtgtagctaaagtcaccggcctccttgaccttgaaggtggtctcggacgtcgtggcgctgaggtcggatccgacaaacgacttttcggcaaagaggtctcggagagtgtccatgaccttgtcggcgccagtctcgatctcctcgtagtcgtacctatggcggcgaggtcgttcaatgctctgagaccgtccgcgtgctcgagccgcgccacactcacctggagaagaagctccttccgtacttctggtagtgcttctgcaagacctccttgatggtctgaccctgctcctcctcgttggcggcggccaagatggccaaccaggctatatcgacgcacgcgtgtttagcacgcgttaccgatacgctgcgttctccgcgactctctgtgggcgcgagactcaccgacgacagcccagagaccgtccttctctcggatatggtcggaaccggttccgaacgattcttctccgcagatggagagacgtccggcgtccatcaagttgccaaagaatttccaacctgtgtcgacgacgagcacgaccgacgaggatcagttgacgctgccgtccgagactcttgcgcgcacgctgccatgcttaccggtagggacctcgaacacctcgaagcccttttccttggcgaccaagtcgatagctccactcgtaggcatactcctggcgagacccttgattccaccgttagccttgctaaagtaagggatggctttttcggcccaatcggcgatgatggcgaccgagtctgaaggggtgacaaaggcgccggcaccgtagatcatgttcctgtcaccgtcaccgtcggaagcggctccaaagacgatgttcttcttttcgaccatctcgacgagctcggaagcgtaggtcaagttgggatcggggtggtgtccaccgaaatcgggcttggggtcacagttctggacggattcggggccgaggccgaggaggtcgataaagatggccttgccgtaaggtccggtgactccgctcagggcgtcgaacaggacggtaggcttggcaggtccgtgcaagtaggccttgatcttttcaaagtcaaagatgcccttgagcaagttgatatagtcctcgacctggtcgacgacctcgatgttcaagggtccgtgagtgaacttgccgatcttgcctaggtcgaactggggtggtagcgtcgtgatccagggatcagtacgagatgcgaggtggccaccatgcacttcatggacctcgacagatgactcacgtcgggcaggtccatctggtggtagacctcgatcttcttggtcaactcgtagatcctgttggtgacctcttccggtgcgggaccaccgttatcgcagttgaacttgattccgaaatcgttgtcgggaccaccggggttgtgagaggcggtgaggaggattccaccgtcagtctttctcgacctgatcatggcggacacggccggggtggagaggatggtgtcttgaccgatgatcaacgacgagacgccgttacccgcagcgagtcggatgatcttctggacggcctcgggggactgttgcgtggttgacgtgtgtcagggtaggttctgacgtgtcgaccgggtgagatcgttgtactcacaaaataccttccatctcctccgacgacaagggtctttcccttgggaccaccgggcatggcagtcagagtggcctgaataaagttctcagtgtagtgctgcgggaagaacagaagtactctgtcagcatcggcgtcgtgcaagacacctccggagaggactcacctcctgctggaacaccttgaccctctttcgaagacccgaagtaccgggcttctggcctgtaacacgggcgtttcagcttcccatcttatcggcacattgacatctaggcgagaatcggggaagactgaccatcgtagaccttggtcttgacttctttggtttcgtagtttgacctgaggtggagacggagatcaacattccgtaatgtagaaagggatgtgcgactgaagccgcgtttcgaggcagatctcacattttgttttatagcttttctctattcttgtctgagtaatatcagagtattatcaagaggtcacagatgtcgtagacgattgatgatttggaatgcaattgacgatggatggatggatgggatgatgatgtgatgcgctgtgggtggttggggaaccgtgtgagactctggttagggggtggagctgacgcgcgcggaagcaaatgattccggaaacaaactagcttcaccaccccgggagcgagtgaacgtcgcgggacgtgtcgacgatcgatagatagtcttcatacgaccgggtcgaatccaccacctttctctcagacctctgtgcgaatgattacaaggtcacgcatgtacgggtaaactaggtgatgatgggagaagaacacgacgagaaagagagagagagagagagagagagcgagacttttgttggggttccatgggggaggaaatctttcccacaaagctggacgacggacgcgtcgaatcaacgggcccatgggctcgtacccggtgccctggccacacctcccgtcctgggtgcacctccagcaccaccgggtcccttggcttgtccccctgttcgttgaccgccagcggcaccggcacctccagtcctctgctgctgtccaccggtagcacccgactgggcgcttcgggggatgggcaggggtgcgttcttgatcgtctcgaacactcggttggcgttctcagcgtttcggataaagaacccagcgaatcgtcggttcgtcgtcgtctcggcgacctggaccatcgactagagcggcatcatgcgatcaacgtcatcgtcggttcgcgggggtcagccatctcgccgcaaacgaatctcggagggccaaacgagatcacactggactcacgccgtcgatgaaaaagtccaaattgttggtgacgaatcgttctccatccaaaagacttccctctccctgcttgtgtccataactcctcgaggcagacttcaagctcatcatcctctcgagcacggtatcctcgtcctcgtccaaaaagttggccagcttggtggcgtcgatcgacgtgtagagcttcaagaacgatcgcatggtcgagacgcccaactgaacctggacgttcgagatgaacaggtcggtctgtcggacgagggcgtcctgaggaggttccgagacccaggcggcgagcgagtcgtggtcctcgtaagggggcgagacgggtgagaggaacttgggactggcacccaagaacaattcacggaaagccgggatggccgtgtccttgccgctctgcatggccgtgagctgttcgccgtatcgctccttgacggtacccatgatgccgtcgtccgaaggtccgggggacaaggtggtacagatggccaagagggcgtacatcctctcgcactgcttggcgatcgaaccgtactggtaactcctggtgtggtactgcttcatcctgttgaaaaagatcaagaccgagacaaagatcttgatggcgtccgggtatcgtccgagggccatgtaggcgaacccgacgtggtagtaggttgtgacgtgacacgccgtgatcttggtcaagagcgagttgttgctcaagtccatatgttgcatggtttgcaaggcgactatcggtggagcaatccagggtcagcacgggctcgttcaccgccgcgtcggcgccaaaggtcgactcacgggtaggatctccgagcagagtgtgaaccctcaacaagcagatcaaggaaaagtatcccaagtttcggtacaagggcttggaaccgtagtcaccggcgatctcactgtccaaaccgtccccgcacgtcatcgtcatcgtcaatcgcctcgtcagccccggaactgcatcacgcacaccccgtccgcaccctcgaaactcacgcgacttcctcgggcgacgatccgttcttctcggcgaccaactgctcgttgatctgcgatttctggaccaacgagtagaggacgttcaagaccgagtaacagctccagatctgagggttctcggcgagcatggtgagttcgtcctcgctcttgttcttgacgacgctcctccattgggcgaacgattggaattggtagacgaattcgtcgagcatgtcccacaaccattggatgggcaggtcgagagggacaggctgttccgagtctatgtcggcgggggtaggtatcgggttagcatccacacgagggtcggtcgaagtttgtccactcactgagcaacaagttgaacaattcgcaaatgttctcgtacgactggaatcggtcatcgacgttgggctcgagcttggcgtagacgtgtcggaagtacaactctcggtaaagagtcaaaaagagttgatctattccccatgcagcgcctcttgtcagtatcaaccccagctcctactggctgttcgatccacgcgtcactcacctccaccgacgagaccggcgacgacctcgccctcgggccactcctcgttcgagtagtattgctgggtgatcctgttccaaccagattcgtacatcgagaggatggcgggggtatcgttgttaaggatggcttggtggaacgattggatgaactgtgtagtgagagtgaaagacgagagttggagtcagtgtgtggtgcaaggcaaggtcgggctcggggcgggatgtcgggcaggacatgtgttggtcgaacgggttgcatcggtagtcccgtagtgtcgccagcaaccccacatacgccacagcgatcgagcgggcccgtcatcgagccatgcaaagcgctccaggaaatcctctcttatacttcagatcggctagatttgcctgccatcctgtgcgatatcccgccctcgaatcgtctcgcctagtcgacgcttcggactaaccttcttgacctcatcggggacctgctcgagagccattttcaacccctccagacgctccctctcctcctcaccatcgtccgcctgggggacacctgcgccggtcagaccgtgctcatcgatgtactcctggtattgaccctgacgctggtcgaggtcggccgaggtggtctgctggtaggcggaaggctcggggaggagcgattcagggtcgtcgtagaaagcttgagacatggtttgtgtgtagcgagttgattcgtagactagtaataaacagtgtacgacttttcgaagggacgggataggataggatgatggatgtagatgggtaacgtttcttgacttttgcttttgttaggatgaggtcgagaagtgagaacgagggggagagagaagtgaaagcggacatcaaatcgtgaaaataggatgatgtccgcgttgcctaactgttgatcacggacatccgtctaatcttatgtccgtttctcgcaccaaacacctccataggaccatctctcgagcatatctagatggaaagttgatgatcatctcgaatttccatcgcatccaagtctgaacatagatcatagacagttcgactcaccttcaagacaaaccctcaaaccatgtcgctctcgagatccgcaattaatcgcacggctctgcctctgcgtcaggcgtcttgtcgtcgaacctacgccgtcgcctcgggtcactcgaaatcaaaccccaaagagcgagactcgaccacttcggactctcgtatggataccatcaggaaagccctctaccctcctctcacgacgacttttaccgccggagcttcctcctcggcttcatccaaaaagaaggccagtcccgaggcagacaccgccgccgaggcttcgcaacaccgagtctttgtgaccgctctgcacgagacttccaagacccacgcttcctcccctactggcacttaccatcctcagatgctcgaccgtctcacccacatcctcctacctacgcccgacgccgaccctgtccgcgcaaaagagacgcacgagaccatcacccgcgctcatctcgtttccaaacgcacggatcgggagtcccgggatcgagccctccgagccaaagaggccagcttgaagcgggcatgtgatgcgctcagggagctctcggaaacatcgtcggaccggtccgtcaagaggttgtacgaagctgcgatgtaccgaccggacgctcggaacaagacctcggcttcccctacccccgaggtggcagagggcaagaagctgtctttggccgagaggaagtactatgatgcgaggatcgagggcatgttccctagggagatgaaagtgccaagagatacgtggccgaacggggacaggtgggactatgggtggaaacgggttggagtatgatcggatgagggagtgtaggggtggttgaccgtcggccgattccccaggacgggaatgtaatgataatgcaagtccggcgggacaccatacatggcatgctactgcgacgacgattttttacgctcagactagctctatcaatgatggctggcaagcagcataatcagggacattggatttggccatgatcaagtacaaggatcgtctatcgatcgaaagggacgagtaccgatgcgaacaaaccattacctggactcgatcttcccgtttgccctcttctgtctttcttcccattcggatcgcagcatggcgctgtcacaaaccaaacgtcagcggtatttcgacatgagccgacgaggtcccgatcacaaagcgagagcgtactcacgtgaagacgatgtcgatgtactttccgtcggcccatgtgtactgacgagctagaccttcctgcttgaaaccactggcaagatcccgatatcagcatcttgcttgagcctcactcctgccccgacttacaggcgctcgtagcactttgcagccggtcgattgtcaaaattgtacgacccatcgatgcggttcagattggccctcttgaagcctacgtcgagcaaccactggagcgcttccgtgccgtaccctttgccgtgatattcaggtatgagcgagatgatgaactcggcccttcgatgatgctctaaaccctttcctggcgggacgagtcgcatgaagccgatcggattggcaggcaaggccggattcgagacgttcgggatcttgatgacgaccctgccgataccgcataagctctatcctgcggaattccgtcgcgcagacttactgaataagagctccgtcggtttcgacgaactgcgcagctcgggccttggtccatggcacgatgatgaatggtttctgccattgggccacactgggattggagcgcaacgtctgaaaccactcgatatctttctcgggatcgatcgcctcgtaaacaaggcgctcgcttttgtggatgtgatcggtatacatgctggccaagtgacgcggtctgttatatgagtactatgtctatgtttagtctacaagtcagcatgtcgagtcggtgtcaaggttggtatacctcggcctatttatatttgaatatcgacccgtttgtagacgagatgaagaacgtgaatctattgtgcactatatcgccggacaaaggtagtcatgctgcgcaatatcttgcaaatatggcatcaagactgatcaatcgcggtcatcttcgaagccccccgtgagctgtccttcaccgattcgatgtggcaacggttgatcgtaggagatctctgtttgcatttaaaaaacatatccagttgtgctatacctgaagctacggaggtacccttcggggaccagggtcccacgttcggcgataattatcgatcaagttctgccatcatcggaagtttgtgatttatgcgagtacagccataacggcacctatcggacagttccatcctgctcaacacgcgcttatcaccaggcctaagcgctgttgagcgcacgccattcgtgttcaaggatgccactgtcagggcgaacccaagaggtcagccagtcatgacagagaaattatagacgtagctctaccaacatgcatacaagatccacccatccgccgttataccacaatgcttctcgctccaaaccttccaccttaaatccactgatttacatatttcgaagccctcagtaatcgtcgcgagacccatgggcccgtttcggcgccgtcgaaacttacaccttttcatagcacttcgctgcacctttgttcaaagtcgaataggtgcctcggatacgatgcaggccagcgtacatgaagccgatcttacataaatagttgagcgcttccgctccgtacccttgcccctgataggcttgatccagactcaacgagaaagtcgcgttccggtggggggctccggggatcaagccgaatagtttaatgaatccaatcgcttgaccaggcagattgccatcgtgaacgtctggaagacatatgacgaggcttcatgagatgtatcgcttcagccccattcatacgagccgcagagacatcgaaatgcacttacgctgcaacgttacccgacggaaccatgctcgagcgagtcgcgtgcagatcggttggagcgacagtagagacattgagcaggcttgctatctgaggcatatttgagaaatggttccgcaaaggagcatcacgatccgcatcgatcgctcggtaaaccaggcgctcgctcttgaaagccacgtcctcgatcagcgtaggtctgtactccattgtccggtcggattatactgctcgaggaagattctcctcggataatatggtgtgctagacgagcttgcctttgaagcgaggacgattcgagcgctgggtttgccttgacagtgttggcaatagccgttatatgtgaccatgatgtatacgagatcagaaaccgatgaaacggcgagagaggatgaaccccaagggactttagtgagttccgaacaaagaatcgcgccatcttgttatttggatcgctcgtcgtcctttgcttcccattgctcaacggaacaagtctgcgttttttgccatccagttttcttcacatcggccacgactgttttgtggcttgccatctcaccgatggcgcgcatattcgtcgttgggcttgaaagccgggtggcaattgtgagctccgagtctaccttcctcggcctcggccgtcctagatgcttcagctgctcgattcgaccccgtgaataggggacgaaggatctgagactgaacgaaactcgaggatgtcagaggtctcgggatgatgtatacgagcattaagaacaagaacaaaacaggcctgaaagcctacgacatattaaaggggaaaagacgaattacgaagggtagagactagacagaaccgaaaaagatccaaagcgccaaaacaaacacgtctatgccttcttgtccttgtggaaggcgcccttgatctgttgatgagatggtgatggtcagtaaacacgatcaaaatcggacggcatcaggtgtcgggcacccaccttggcaaagaagctgctctttcgctttcgcatggtatccgagctctcctccttgcggtgcccgccgggagtcgagctggtcgtgctgctcggggttccgggttgagtcctaccttcccggtcagcgactcgggaagcgggagtggcgggggtcgcgactgccacgacgggatcaccggccttgacgggcagaggagtgatcggggtcgcaggggcggcggtcgtggcgataggtccggtggtcttgaccggggtggcgggaccgacatccttggccaggggttgttgagtagcaccgaggggcagaccagcgaggggcttgttcgtgtcggcggtcttggcgtagctcctgctgggcacaccctcgatatcaccgtttcgcttgttgaactcctcgttcaatgcggcctgtttgggatcggcatcgggacgcgacgacatctgggtaccggcgtcgtcggtagcgttgggacgagttcggtccttggtgggttgaccaatgttggtgatcatgggctggggtacctttttgtggttgttctcgcgagtctcgtcctggcccaagatgtcgttacccttggggtccttgtccttcgagtcgggcgtgttggacgaaaagacgtcgacctgcttggactcggtgggacgggaagcggtagcctggcgagtggtgctggcgaccttgtcggcagccgagtgttccgagtgttgaccggcgtgcgattgggtctgggtggcgaccgggacgacgggtacgaccgggacgacggtggcagtggaagcaacgggggcggcttgagtggtcgcgggggcgacaccaccgacctgggccggggtaggtcccctggcggttccaagaggagccgcttgaccaggtccacctgcgagaccggtcgagacgggagccgcaaaggcgttggggctgggtccaccgatgggcgcgccgagtccctgaggacccttggaccactgggcgtagctcgagctagccgacgcggccgcggccgaggcagcaggggcggcgatcacgctcgccgagggaacggacgaaccgacgacagcggcagcgctggcggaaagacccgacgatccgacggcctgggtggtggtggatgcgatgggctggccggtagcagtgtcgatacccttctccttggcttcctgtacagtcatctgaccccatacatagggcacgaacgtcagcaatggaactctgtaggcgtatccagaccgatcccagacttacggggttgttgtgcaagaggtcgacaccggtcgcactgtggacggcctcgttggcaccgacgacgagcccggtagcagcggcgccgagggcggcgagggccgaagttccaaagtggctgacggtctcggccaatccctcgtggtgctcggtggtctgagccgaagtgggaacgttggcgcccgaggtcgagctctccctgaccttgtcggcggcggcgtgcgaggtggtggtggacgaaccgaaaggcgcggtggcatcggccaactctttcaagggctgagcaggggtctgatcgatagccttgatctcctcgtgagcgtgagcggtggtcgatccggcggtcgaaccaaagacgggcttggtcgcgtcggccaactctttgagggcgtcggcgggatcgtggtgggccgagatctttgcaccagtctccttggcagccaagtgagcggcattgttggtcacgccggcgttggaaccgaggaccggcgaagtggcgacggcgagctctttgagaggcgcggagggctcgtggtggtgagaaccggtctcggcggaagcgttgttcgaaatcgtggtgggtccagtcttgacggcggacaaagtcgaggcgccgtgagagctagcctcggggttgttcgagatggtcgtaggtccagtgtgaatggccgagcccgagctggcgttggcatcacgtacgggagcgacggcggtctcgttcgaagccgaagccgaggtcgagttcgaggtcatggtaggtgccgacgcgtaggtggtagtggtggtgtggtgtcctcccatcgaagctgtaccccgagagagattccgaagatcagtctatgccctgtcacctaccaagcgcctttagactcacaagaccctccacctagaggcgcacccaaagccaatcctcccaaaaggtcgttcccagccttggtgctctcgccgacgacgagtttgccagcctcaatctcccccgcagcggccctcgagacggacgtctgcgtctccctcaacccggtggcgaacgaccccgacccggctccgatgtcggtcctgtcagacgcgctcgaggtgttgtgacccgcagcggcgactcccgatccaggggcgtgcgagctgatcaggttcttggccttgtccaggacgctctcgtccttcttgttctcctcgccatgaggagcatcgaggtgacggtcgtgcctgtcctcggctttctccctctccaaggtggaagccgcgggagccggggcgacgacaggtgcggccgtggaggcggcgggagcgttggtgttggtgttggtgcttgtgttcgtgttgtcgacgaccggggaggaagtcgagacgtgttcagtcgcggtcttggtaggcgatcgaggagtgaccgacgaggccgaggcggcggcgcctgctccgacagctgcagcacctgcaccgacgacggctgcaccggcagcagcgggagcagcagcggcggcggcggcgtgatgctgatccttgtcctgcatctcggcttccttcttggccggggcgttgaaaatgttgttcatgttccccgcagcgtctatccccagtccgtatcagccaactcgacctgcctcgacccacgacccgacccgaatcgactcaccccactccttgtcctcgtcctccctgatcaaccaatgtccatcgacgacatacttgtaggcgattctctccccgaacgggatctctacctctccttcccagtacccgccgttcgattcgttcttgtggagatgatgcctctctcctgaccagttgtcaaacgtccccgtgacgacgaccgacgacgaaggggttgggggccaggtgaacttgtgggtgtatagatctcggccgggcatcgtggacaagcagaagagaggagaagctgtggtgtgattatgtagtcgagtggtagtgttgttgagagggttcccgatgtgtggtgagtaacgcctccgaggatgtattctgttcgagtccgatcggttcagccggcacaagtttgaattcgaggtcgagatgaagatgaattcgatctgggttagcagctggtcttttcgtcatttctctttcgatctcgaagatgaaaaggactggacctggaccggattcaacgcgtcgatccagccagccagccccctttcgaaggagaagaggaagacccgaaggatttgcggatggacgggactcacgattcagacgatcgaacttacgagttgaagttgtcctatcaatcgatctccgattatgtgagtgacgagtggcgatgaagagggtttgaattgtagatgagatggtgaatagaggtcgaggtcgaggtcgaggtcgaggtgtggattattgggggatggaggtgagaaaggggagggagggaaagtcgaccaaccaaccacacgcgcgcggtccagtcaaagagtgacggcatcgattttcacctctttggggcagaagaaatggtaatcatcacatcacatgcacaaacacagtcacacacacaaggggattcattcgtcaaccctttgtacacaccagctagacttgcaagggctcacacgggcatgaaatgtacgcatcaaagctccataaatatgttcaccctggaggccatctcgcaacatcactggccgacaagcagaacatccagacgtttcgacgaccccaggcccctccggatcaggtggtcactcactcacctacacagtctcacgcgggcgcgcggtaccgagacggcaaaaaaggcagacgcgatgacgtcaggtacatgaccccgtcccgcccgctttggtacgtccgaacctcacattattatcgctcttgccacgcatgcactccttgaacgatacctccatgtacccaattgccggtcccattatttaatgtcgtcgtcgctgttgttgttgatatctctgttttgttgacatctcctgacaacgggctacggcccaagctccgctcgcggttcggtcgaactttcgatcccggtccccccccccattctctcacgcttcggctcgggtgacgggggcatgaggacagagagtttcgattccattcgatttcatctgagcctcgggtcggtctcgcgctggaagtcgggaacaaacgtggtgtacattgatagttctggcctgagggtgtcgtttcggagtgagatcatcaacttgtctttggctggggttcaaatgaacgaatgcaagccacaccggacgtttcagatgcatcacccgtctcgacaataacgccaacgattgaactacatactagaacgctaggactaaaatctacgaccacactcctactctgtatcttttgcgcgcgccgacgatccgaggtccgagacattcccacgccctgacccccctgcctcgctgggtgcgcgtcgtgtcaaggtgaaacgccaaccctagccagagttccgagcctccgtgatcggatagggggggcatgacgagtgtgatccgggcagcgtggatagcctttgtcgtcctcccaagacagagcttttgattgcagctctttccgctcgccccacgtgcgtgaccagcgaccatacagcccagcgtgtcgatcaaacgatccaaaggataccctccctcggatcattcgatcggacgactactacaaaacatattccgcagcccagcctacagcttgaccctcctttaacacccaaacaaacttctcgcagtccagggaatcccaagccgactcacaaatcgcagtcgtccgtagtccaaaccgaacatgtcgaagctgtgcaaagtaccggggtaggggggagaacggatcatggacagaaacaaggagaatgcgatcaaggaaggtcgtgcgtgagctttttgctcgtctacgtataagaaggaggacagggcgatgtgctcgaacaaactttctggcaggtctttctccttccacaatcaggtggaaagacgatctcgacaacctctcgcaatctggtagcgtttcactgtctaagcactataccagcacccagaccatcccacctggtctgacgaatcgtctcgtaacacgatgggtttcctcgataaactgatcagcaagctcgatgatgacaaccccgccaaacccgtagaccacactggtggctacgctcagcctgactatcaccagtctcaatctcaacagcagcagcagcagccgccatcttactaccaacagcctccccaccaggggatgtatgggcaggaccaatttagtgctccgcaagcccaggggtacggtcagagcgggtacgaccagggtcatgctcagggacaaggacaggttcaatacggacatgccgccggtgggggttacatgccaccacctccaggtcaaggatttatggaccgtgagtgatcccgcccctcttccgctctgtcctcctctttgacgcgacgacgacgtgcggggcaattcaccatcgcagccggtctcgaatctcacatccgtagtcggaccgcccagaacctctttcaaacgttttccacacagctcttccaggcggaacagaacctcgctcatgtcccgccttacgacgtccaacgcaagtttgagctcgagaccgagatcaagatcctcaagaccgtggtcggtttgtgtcaagggttcagcgggggtacggatgctgggttgagcgatgggtttagggggatgcaggtgggcgatcatggggccgtaatgatgatgcctactggtcatcaggctcaagggtgagcacagggggatttctcggtagacgttccgtatccctggctgaacctgttcgacgctcgggtctgcgtcttatagataccccgtccacccgtacgcacatgcgagcggtcaatcggctgccgacaaggaaaaggaagacaagaagaaactcatactcgccactgcaggagccggagccgtcggcctcggagcgggcatgttgctcgccgatcgtgacgacattgacaaggaggaggaatacaggaggagggcagaggaagaggaaagggagaggggaagcaggagtggaagtgcgagtgatagcagcagtgatggtggagagtatggtgaggatgacgagtagcatggcaactttctatggggatgtttcagctcgatgaccgtattcagcttcctggtctcccgcaattcgaaactcgccgacaatcgagtcgagcccgtcttgtcctctcggtcggccgacatgacgatacatccatgttcatcggcagcatcttgtctcgtcaggtacacaaacatagtccaaagtctagtgcgccaacacccccttggtgctaggcacgtcgtttccacctgtccgctcgatagcctgtcggatagccaaagccaacgccttgaaagcggattcagcgctatcgtgacatgaaacaagacgtcaccatatcctcggtattagcaatcctggcgacgatactgcacgcgttgcggctcacatgtgatgattgttcttgccccggatcgagtcgacgtggagggtcacaccggcggcaaaggcgaacgattcgagcaggtggtgaatcatctcggtcgagactgccatcgcgtagtgacgaagtgacaaagcgataggaaggggttatacaatgcaatcatgtcagtattcgcagatgcatgcgtcagaggtggagtggtacgggcgactcacggtcgccaattttttcccgcgtaaaggggaggtcagagacaaagtacggtcgggaagatatatcgatgacggccctcgacaacgcctaaccatagggtgtcaagacgtcagaacctcgtctagacatgcgcgtgttcaagatcccgctcgtcgacccgatcacagactcacctcgtccaacggggcgtaagcgctaccgtacctcctgatccctcttcgctctcccaaggcctttttgaaagcttctccaagagccagagcacagtcttcagcagtgtggtggtcatcaatgtgcaggtcacctttgcactgaaggtcgagcgacatctggccgtgcttggcgagcgcggtgaacatctgttccgttgaatgacgtgcggcgagggagagggaacagagatcagccgagacaaagaagaaaaatgaagagacgttgccaaacttgcgtgatcaaggaagccgatcccggtcgagacgttgatctcttgcttgtggactccgggtacgacatccagcgtgagagtacattttatgctcgtctctgacgtctctcgcgcgacggtggcggttcggatagcaggttcggcagacattattgattacggactggggtgttttgttgaattctcaagggtagtacgacctggtcgaatcgaattgtgatctgtatcacagtagctagccataacctctcaatctcgtctgtgcggcttgggtctctagcgatggatcgactttttcaaaatgcatagagatggacgatttgacgattttatgcgtttccagatcgatatgcgagagattacgaaccacacgcacctacatacacaccacccttgcaatcaatccaacattttgccagagtctagatgtcgaaataaatacacatactcgccagctgcttcttgccaccatttagcaactagccttaccacagatccgcatcaaagcgctgtctgcaatcatgtcatcctcaaacctcgtgacgatcaactcgccggaacagttcaaggaggtcctctcgcgggacctgaacaaggtctcggtcctcgatttctgggcgacatgggctcaaccgtgtgagaagatgaacgaggtggtcaaggaggcgagcgaaaagtacaaggatgtcttgttcctcatggtgagtttcataaactgtgaccgatcgtgtagagctggaaccagagggagttgaagtgcaactgacgacttgcatgcgcgtgtagatcgaggcggatgtgcaggatgagattgccgactcgttcgacatcgaagaggtccctactttcctcatccttagagtgagtttgatcatgtcaatccagtctcgcttcttgcatcttactgatagacgatgtctcgcgcctttctcgcatgctgtctctcggtatatgacagggtcacaccctcctcgcccgacacgccggctccaacgctcctctccttctccagctcatcgaacaacactcatcctcctccaactcggtccctacgcctttgagctccacgaccaaagcccccatggcacctgcgacctctaccccgacttccaacggtgcaggtccttccattcctccttacggtagcgagacaccagaacagctcgaagcgaggtgcaccgagctcatgaaccgacacaaggtcgtattgttcatgaaaggaaaccccagcgcgccaaagtgcgggttcagtcgacagatcgtcgggttgttgcgtgaccgtggcgtggaattcgcttggtacgatatcctgagcgatcaggccgtcagggaagaattaaagaagatgaacgactggcctagtgagtgttccgttcgattctcccgtatatcgagtacccggggcgcgcacttcccgggcggaacatacggcagtttgctgattttcctacctctctacgtctcagctttcccgcaagtgatcctcaacggagagctgatcgggggtctagacattttcaaggactcgctcgagagcggcgagtgggatgagatgtacgaatctaccgagtagcgagctgtttgccgtctgggccgatggatcctgtgatcgagatatggtagatgcaatggatatatggacatgtatgatacccaggccagcctgaaactcgtgacgcgcgtacgttcagcagactttgcattttttcctcgtaaattggtacacttcaagtctcctaggttgaatttcttgatggtttgctcgggctaaggctagcatgtgtagctgcttgccaagaccctccccgcccccagggatctcgatctggccggcctcaagctctttctgggtatcatacaaggtccaaagacgctatgacttgaaatactgatgttggtacaagagacggcattgaaaacatttacgaagaaagcttcactcgcagatttctgaaacgcaatttcgatactcgacatatagtcctctaggagcatttgaaaatccccctcggtatgcggacactcaccttggctcaatcacactgtgaagcatcagtctcgatagggtcgaagattccacgtgcaagagcgcaaatgctagatctcgattgattgtacctcgagcgtagcatctcacgactcgctccgacgtctagtgatgcgccaatgaaatgtcattcatacaatcaccacgatgacctatgtaatatttcttttgccattcggctcctctcgagtttgtagatctcacgtccgtcctcatacatgtctgccttgcgaagcagaatctaccgattaggacgtatcagctttgagcaagtactgcgtcagtcacaccgatgcgacacgctcactttagctggctcgactgtagcgcccttctccatagagtctgagatagcctcggtgagatcgtctctccgacctgtcgaagcattcgacggatctcgtcagagcggtcactcaactctaccatgtctggtttggctcaccatacacctgtccgagcgtgatctggctacagacgcggctaccgaccgacatcttcgcgagttctttctgaatcgatataacgctgtcttcgtcgtgcgtagcaaagaatggcttgacctcggtctgtgctctcgatccgcttgtctgtggtatccgactcgcttccagaacctgcctggcgatcgccacatacgtgccagttttcgaatcggcttcgattgaacggtcctatacgtcagcgcgaaaccggatcctgctcgtacaagcccagagctcactctcttgttccaacttgatacccaacgaataacccgcctgacgggcccgctcgacttggctcatgattttctctccatccgacatggaagccgatctcatgtcgacgtgtaccacagggagaccgtcctcaggcttgttgaagtcactcatcaacttgtcggtcaagacttcgattgtcgattgccggtcgccattgtcatcttctcgctcgatgtagacgtctagtccgatctgtcttgattgctgaacaatctcccggacggcctcgtaagcgtcgtccagcataaagacatctcgaatgttctgccagccattggcgtgatcgatcgaccacaacttttcccaatctccatcttgtacgaggagtctcctggtttctgacgatgctcgacgttcctctgccagtctctcggctcgtcgaaccagtacatccgggtcgggcaagaggccagacaatttgaacagaatgctgatacggttacgcgcaggtcccgactgtcgagctacttggcttgcaagctcaacagcttcgagtatctcatccttgtacttggtagcagtcttgacggccgcttcttcagcttcttctccctcgcccgcgagacgtagcggatcagcaaaggtcactacggacccgatcctcttctcgttcaacgactgcgcaactttgaagacctcttgcagcgtctcgcctgtgctgaactgaatatacaaagcccacgacgtcggccatttgatcaggcttattcccgagagatgacgaccgagtgtaacaggatgctgacctgatgagacaaggccagtgatgtgagccgacttcggataggagccaatatagatccctcttcggagtcagacagtgatgcgctcgagaggtaagcgaaagcactggagatagaaaccggacatatcagcgaccggcctttgacatgaccccagttggtgttactgagccgcgggtatatactgacaggtaactctttatgacatccccggtgctcattgaggacaggaggatgtcaggggtttgcttgcgagccgtcttggcgtacgcggaggcgtcccacgccagccagcctacagtgatcagtgccgctgaggctacgtagacggccgccttgcggccgggcggtatacgacgtcgaacagggggatcaatgggtagggatcttgcatcgctattgaggtgtcgactttggcgcgatctcaacctaaagacaggccgagctgctcggccagcacggcctatggtaggtgatacgaatgacatggctgctcgacaggcattccttccctgcaattgcatggtctatactgcagagcattagcttggcggcaaggactggcaggcgggcatcgaacgtttgataacgatgatgcgaagtggtgatggtggtcaaaagggaaaaagttggagaaaccttccgagacaaacccgaatgccgatcggtcaggcacgcgtcatctttcgctcaaacgtcaacaacccgaccacgcggcaaaagggttttggataggtgagaccctctcggagacggtcaatgccagaagagctcccgagtcgactcgtccgtcgcttgagccgcaagccatccgtcgtctcgattcgagcgcatcagctcgcagggaaaggatgccaagcgataacggatctaatgcatttcacgtgcccttctggaaccggtccggtggcgtcatccgcgacgaatctggtgagcggtccctttgcatggtataacgtctgctgctgcactgtggtgtgtagtcctggagtgaggcacatgtccgagtcgaacacggcctcagcccggtgatcgtccagcgggtagataagccattggccctatactaagcttcgaaaagccacatgcgccattgactgaagctgcgacgttcgcgctttcggaggcgagattcaggcgtcaatgagttgacgtcaatcggacagtcgtacaggcgaggaaaggctcgtaacttgttgacgacaccagcattcatgcatggtggcgaccgacgtgggtgctcaggcatttgttccgtgtaccccacagagacagacaaagtataaagtctcgatgcgtcccgatccgaacataacctaccatgagcttcagcttccaaatttcagcgcctctcatcttctcttcacatcgtctataccacctaagacctttcattggcttctttatcctgtaaaaaatgctctacatcccgaagatcctcgccatgttgttttttcgtctctgtcaccgttcaagctcagcaaggcgtctcgtacgtgatgagtaacgacgggaccgtccaatacccatgcgaaaccgcggctcttgcagagacttactatcaggacaaatgttggtcgttgtcgccatcggaatgtgtaccaaaggaaggggtgctgatgtctcgccacaaggacaggcgcaagcgagacgatggacgggcaaaagttgcacaaggtggaagtcttgacggattacctcacaggccgagatgactacaaacttcacctcaagtgctagtacgtcccagctttcgtgtcaacactcgcgtgaacgcttgattgctcagacaatacttgtgcgttgcagctacaacaacgacgacaacagcttctgcgattacattgccgacaagctcactcccgtgagtctctcgtgtcacatcatgccgtgtagtccgttccatctgacaagggacacgttgctgaatactttattcgcaggactgtacgctcttcgattcaagtatattgggagacaagtgtcgaaagcttgtcaacattgcctttcacggggatggcagagctccccaaccgcaaccctcgggtactactggaaacaccgacggcttcggtgagtcacgtcgagaagagtgcgaccagcagcgatttcatgcttacgatcgcgacgctccgatcttctgcggcaatcatgtagtgatacctcgatacgtttgtcctacgcacatcgacgctgtctcatctatcctcaccaagctgacgggtggcctggacttgatccgtaagcagctactttgaagatcatcacgggtcttgaatactaattctctctttcggcctatgtcaggtccctacgtgtgtaaattcaaaggctttgaatgcatcactttcgaggtaggtccatggtagttccggccgtcgcacgcataagactaaaactgccccgcctgattaggacggaaaaccttcgctgagcaacaacccgctctgtcccgcggaactctgtcccaaccactttacgaccgatttgactcgacgtcgactacaatctcccgccatcgctgctcggcaagtcgataccgctgcgctgaggcgcaaggcggtagctgccaggaatgcgcaagtcggacctacgaggacgagtactcgcactggcgcgcctaggagattggcccggggcgagcagtgatcgcgcaggtcccttttcgttctggcgagtcctcaagtaaaaacactccaaacaggcgtggatggataagaatctcagtgtgcagctcagtcgatagacatagatattcaggatagctggctcgatagaaagaacggtttgacatgtatcccactaaactctatgggcaacagccatagacacataacatgaatgagcaacgaatctctcgaggaatgggaggacgtcattcctgcgcttcaacaagccctggtctcggcaagcaggattaggaagatcaagcctgaataggcgagcacgatgatcgtcgacccggccccacgcggaattgtgacggaaccgcgatacagtttgataattcagaaaccctagctacagtttatccgcttatataccaattccccctatcgttgccgatcctgtttagacgacctcggcggtaggttgcctctttcccaacccgctcttttcgtagatcgcatcgatcgtctccatctgctgaatgctatcttccccggagacccagtggtgcggcttgttgcccctgatcttgttgcagaacgcttccaactggtacctacgacgaatttttgtgatccgacatcgtccccatggatcagcgttggcatgcggctcgcatcgaggaagctcgcggggactgacctgtaagtgctccaaggctgggccgatttgggttctgagggaaagttatagcgcttctcgtacgtcgtcttcttggtccgcttgtcgtagatgctgatgtaatgatacaggtgaggcatcatgaagctgatctctcgcgactcgacttagtgtccatgatcggcaactctacgaagcgaaacgagaccgactcacttgtaaaagtaaacaatagcattctcgagctcgatttcgatggcgggcaactgccagaccctcgggatgacaaaggccaagttgggctgatccagatcagcgtagatgctgctgttgatcgtgtgaccctgttcactctcgacatggagttccgcttccatggccgcgtccactcgaggatcttgagaccaagggcgagctttagccgagacgatgtcgatggacttggggtcagtgaagaaacgggtcgaggagattgtgtaggtctgatgaaagccaaagtccatatcggagaggtggacgagttcagcaaagcgctgcggtttcttatagattcggcgcgctgcaactcgcctcgtccatcaacgcgcctcctccgagcaagtacttccatcggatatcgctcgccgggatggagttcttcggggtgaccattctcgctctcgtcctcgtgaccctcccatattgtccactctgtacgagcgctttgaccgcatgggcggccgggtgaaacctccagtgaaaggcctcaagcgcgaccttgcccgtctcttccgccacttgaaagatccttctcgtctcttcagcgttggacgagatgggtttctcgataaggacgtgtttcccggctcgcatggatttgatggcccattctgaacgaggaaaacaaaagagtcgaatggaggagatcgtaagttcagggttttcaatggcgaagatcgcggcgacgcgactactacgactactactactgctcaccgccatgcatcccgttggggacggagatgtagacggcctcgatctcgggatcctgcaacaacgcctcgtaactcccgtatgatttaggaatcccgtactgtttcgccgactttgccgcgacgccttgatccctggaagcgatggcaacgattttggctccggcgtaagaagccgccgggttgaagaccgcggccgaattgatcatggccgaggagaggacgccgatcttgacggtgacgggggtcttggtgaccttgttggcttgcattccttcataccaatattggtgaagaaacgtcagggtttgacagacctggaggtagcaacgccatgcatgcggggtcaggcaaggtcgtgcgttatctctggccgagctgaccgtgacgtgttgacttaccatcgccatgatttcgggattcaatctttttgtataggtagacgactactggggacaaattgtggttgatcggaatgatgcgaaagtcgggtcgaatcctttcaagactgatttgatacgggatgatgttgaacgttcacaagcccgacgttcgactatataaaaccgtagccttagtcgactcatgacgacacgactgatgtttgtgattccagagaatttccctgtccgtgtgccgtgtgatgcgatcaaccgcaccctccacctcttgggatgatgatgtacacgttatccaccggtcaacctctgacctgaccaagagaccagtcagcatccaacgtttcgtcagcaaagagagcgacgacgccaacgctcacgtagtacctaacctgtctgcctacctaccatcaggcgaaaaggggcaaacgcaagaatgacgccatcacctacagctactccacgtagacacacgctcgacatgattgatcacctgaagcgtccgccaacctgacttgctggtgtccaacgaatggggtggacaagcagccatattctcgcattccacaaacctcgagagtagccattcttgtgatcccaaccgcgcgtatgccaagatcgatcaacagcattcgagtacaatgctgtctttgcaagggtaaccgaggtctattcccgaccccagcgcctggagggcctcacactgagatacgatagccggcatatagctgtctgtggtcgttcacatgaacacaaaagaagagggactggccgggttgggactcgaaatcattattgtacgagacggcgttctcgatccaaaacgagcgtcccatggtcaagtctctcagccgcctaacaggcagctgccctggaaagtgatctgcacatctctctggtgttcatcgactgatcgctataatacaacgacttgcgtatgatctcgtcatttcgacaacgatctccttctacgataacgtgtcctgaagggaagagctctctcacattctctctcttcgcaatcagcctctctcttcgcaatcagtgcctgcgatacgcggccacgagacgatcagcacacgtcctgctcctgctatcgtccgacccgatcattgccgcactcactggctccattcgatcgtgttgatgtcgatcccttcctgtaccatctcccacaacggactcatctccctcaacttggtcacgacggcgacgatcttttcgacgacgaaatcgatctcttgttcggtcgtgaacctgccgatcccgaacctcaaggaagaatgggccatggcctcgtcggcgcccaacgaacggaggacgtaggacggttcgagcgaggccgaagtgcatgcggatcccgacgagagggcgatggacttcaaggccatcaagagggactcgccctcgacatagctgaacgagaggttgacgcagccggggtatccgttggggtcgccattacggacgacgaggtcgacgcgttcgttaatcccgttgatgagacggtcagcgagcgacttgatccgagcgtggtccgactgcaaggtggggcgcagaagaaggggagaaacaggtggcaccgttagctctggatcgttcagaaaaaaaggctctccacctcccgtctcgtctcggcgcgaccccgctctcgaccggattcagtacccctgcacaattcaagttcgctctcgcgtccaaccccgacccccgcctgcccccgcaagccgacctgtgctccgaaaaaaaatcggagacagtgggagagtggaccgacaggacgatcgacctggacgataacgagccctgcctttttcccaacccggctctccgtcgttcgatgacgccgtcgatgccgagcggattcgaggaccagtgcggttttcgtcatgatcctcttctcttcttcttgcttctcggcaaccacctggtttacctctcgacttgggcgacaagagtcgccagaggtccatgacgaccgagcctcatccccgtcaggaacaaaaaagaggaagaagaacaaagacctctgcggcacgctccgaaaccactgtcctgggaagctagaaccgataccaaacgctcaccttcatttcctcgctggcgatcctacaagcctcacccaacccgaccgtcaaaaaggtgggtactgtcccgctccgcagacccctttcctgtccacctccatggatgaggggttccaacctgaccctgggtctcctcctcacatatgccgcgccgacacctttaggtccgtacagcttgtgccccgagatggaagccgcgtccaggcccatcttttcgacgtcaatggggatcttgccggtcgcctgtgcaatgtcggaatggaaaaagatcttggctcccttgtgctccttttgatgatccttcaacaactgtccgatggcctccatgggttggatacatccgatctcgttgttgacggccatgatcgagaccaagcacgtcgtcggtctcagagcatccttcaagactgcaaggtcgaccaacccgtccgatttcacggggagataggtgacctcgaacccttgttcggcgaggtacctacacgaatcgaggacacacttgtgctccgtctgggtcgtgatgatgtggttacgcttggctttgtagaacctggcgatccccttgatgagcatattgttgctctcggtggcgcccgaggtgaagatgatgtccttgctgctggctccgatcaggccggcgacttgggcacgggccttttcgacggcggtctctgcttcccaaccgtaagcgtgggtccgcgagtgggggttcccgtacaggtcggtcaggtaggggagaatggcgtctagcacgcgggggtccatcggcgtcgtggcctgtgacagatcccgggggtcgatcgatgatgagctacttcaaagacgatctgattcgacacgcaacaaatgtgatactgacctgtgcgtcgaggtaaatgggccttccatccgtcttttcttgtccgcctaccgagctctcctttttagtgacttcgaacccgaacaattccgtcgtcccgcctccctctctcttgatcgactcgcccgctcgatctccacgactgttctcgagcctctcgtgcggggagattccattcttctgttccttttccgagcctgatgtcgattgagactggggtggaaggttgggtgagaccgaagcgagggttcgggtgaatgccggggcgatcgacagggaggacgacgacgaggttgtcgatgtcgatgtgggcaggtgagaagcgatcgaacgggctcgagatgcgaacctggtagcgaacatcttggcgagtgagtttttgggtgtgtgtgtgtaatggtcaacacagtatggtcaatgttgtgttttgggaggcggagggtgtacatgatacaagatcttcgatcttcttgattcagctggaggaggcgattagctaggagagtgatcaggagtcaattgaccatggactcgccgtccgtcagtcaagcggcggcggcgagggggaaaagagtttctcggcattgtttcggcagatcattacgtcagatcaagaaaggccagatgccgagctgagccgagatctacgatgccgttatcgccaatcacgtgatcatagtttccatcttttgaatccgccgctcttacgcctttgatgcccgatcctcctctcgataaagttgtaatttcagcttggattcgccttgaattcattcattcacacctctgacatgttccatcttccaaactcgaccaccacatcaggcagacacctaagcaagacttcaccgtcggatattctcgccgatcatgtccacaaaaccgggtccatcctcgcaccctaattcgaaacatcaacgcaaacagcgggatcctcacactcaacagcggatcaagtcgaatgcgctcaagaggaagaatcaggatgaagagctctcccagctcgaacgtgccatcgaggcgtttgtgagtgaaggcagtaacctagacagcgtctttacgtcgtgtcgtgtcgtctcgtgttgcgttacgttgcgggtgactgactgacgaatgcatacacatgatgcaggacccatcgacgccgatcgagacgtttgaccaactccccctttccacccgaaccctacgcggcctaaaatcttcccatttcaccactccgaccccgattcaacggacctcgattccaatctcactctcccggaaagacgtgctcggttccgcccggactggatcgggcaagacgttggctttcctcatccccttgcttgaacgactctacctcgagcgttggggccctatggacggtctaggcgccgtcgtgctcagtcctactagagaactcgccatccagacgttcaacgctctaaggtctatcgggggacatcacaccttttccgccggattggtcatcggtgggaaatcgctcaaggacgagcaggagaggttacagcggatgaacatcttgatcgccactccagggaggttgttacagcatttcgatagtaccgtcgggttggatacgagcggggtcaaggtactcgtactggacgaagccgatcgattgttggacctagggttcttgcctacgttgcgtgcgatcatccagcacatcactcctggaggcgggacctccacggcatcgacaacgacgacgaccgggacgggaagacagaccttgttgttctcggccactcaatccccaaacctcgtccacctggctaaactctccctcaattcgcctgtcacgatcgacgtggaccagcacctcgactctggcggtctcgatgccgacgggtcgaattccaccggcggcgccaacaacgggaccttgatgcctgcgggtctggaacagttttacgccgtcgtcgagctggatcgcaaattggacgccttgtggggattcgtcaagagtcatctcaaaatgaagggggtcgtctttgtgagcagttgtaaacaggtaagccaagttcgacggggagggttcggcgaggatagataaagcgatgcgcgctccagtgactgatcatccgaggtcaccatcgaccgactcttatcgttctcacacaggtccggttcatcttcgagaccttccgtcgactacatccgggacttcccctcatgcatttgcatgggaaacagaaacaacccacccggttggacattttccaacgtttctcgcaatctaccgtcgccctgctcgtatgtaccgacatcgcctcgcggggtctcgatttccccctggtcgactgggtcatccagctcgactgccctgaagacgtggacatgtacatacaccgggtcggacggacggcgcgataccagtctgggggcaaagggttgacgatcctctgtccgagtgaagaggaagggatgaagaagcgctgggaggaaaagggattgcaagtcaagaggatcaggatcaaggagagcaagatgggacagttgcaacagcagatgcagaatttcgccttccgggacccagagatcaagtatatgggtcagagggtgagtcttcccgcaatcgacttgggtcccggacccgtgcatgactgatccgttcacacgtcgtctacaggcgtttgtctcgtacatgaaatctgtccacctacaaaaggacaagtcgatctttgatctcactcagttgcccatcgaggcgttcgccgcatcgctcgggttgcccggagcgcctcagatcaagtttatcggacaggcacatcagaggaagaatgcggcgaggggcaaattgcagcaacagcaggacaaggaaggaaaggaggccgaggtggcagggagagggaccaacatggccggtgagaaagaggtcgagagtcggttggaaggggtcgagcttggggatagcgagagcgacgagagcgaggtcgatggtgacagcgatgttgagctcgaggatgtcaaggcggtcgttcaaggcgaagatcacagtggtgaggaagacgacgacgacgatgacgatagcctcgttcaagccaaggatgatattcctgctgctgcgaaaaaggcaagtcgcgcccttgttctccgcctctccgacgacaaactgaccctcaacaactcttacttgacaggacaaacaagcggtcaggactaaatacgaccggatgttcgagcggaagaatcaaggcgtcctcgcgcctcatttctctgccctcgtcactcacgatggtgtcgtacaggacggcgaggatgacgacggtttcctcactctcaaggaacgcgatcatacgctcgaagccgtcggtctcgacgggcctgctgaaggtgacgaccaccaagcttccggctcgacccctgcgttgacctcggctgagatgctgtccaagcggaagctcaagatgggagaatctcgtaaagccatgctcaagctcaaatcgagcggacacaaggtcgtgttcgatgaagacggtggcgcgcacgaaatgtacgagatggagggcgaggacgatttcgccaaacgtggggatgcggagacgcagcgcgaggaatacttgaaggtcaaccgtgaggtcatgaaagaggccgatgtcgaggatcgaagggtggccagggaaaagaggcaggagaagaagaggaaacgaaaggacagggagagggaagaggtgagtcgagtcgcacttttccccaacttcgagaacgctcacctttgtccgacctacctcgcagcgactggctgagcaggaaggcagcgacgatggggaaggcgactttggcgtcaccctgggtcgagcttcggatgcgtcccaatcggtctcgtcagaggacgaggacgaggacgaggtcgcccccgccagacccacgaaaaaggccaggttcggggctgccgagatcaagtccgccgcaggcgacgacgatgaagaggcgttggctttgcgtttattgcaaggctcggcatgatttggctctttgggtgtcatcagcgatgtagcacttgcacatgcacatgtatcggtttcggtccggtcgatcggtcgatgatgattaactagctagaatatgcccgaacctcggttgaacgcgcgtcgatcgccgcagttgaccaccgaccacctcggtcgagaaacagagatgttctcactcgtgcttgattgctcatccgactttatcatccatatcatatccgtcatcgccgttcgttttgcctcttgtacacttgttcatatacagccattcacacacatccactagccatcaagctacagaggaaccacttcgttgtctttagggaaatcgcaccattcacgctcgtgcccgagcttcacttgattcaacggaccatcacccaccagtagtaaagtagtggcgtagacgacctttcctaccatggccaccacccgagtcgagacaccgagtcccagccgttcacggcggacatccgacgaaatgctttttatcggtcagaggtgttcacacgacgcctgtaacctcgtagatttcctacctctaaaggtcagtccttcccactgtcaactgcaccccattcagtcgaacccagctcatttcttcgaatacttacccccgtcttttcgtactcgtcatccatcagtgccaatactgtcaccaaccatactgcggctctcatttctctctgtccacccatacatgtcctaatcggccccccgaatacaccctcaaccgagtcgctcctctgtgcccattatgctctaccccgatctctgcgctccctggggaagatcccaacattccgatggaacggcatatcctgtcagagtgccgtggaaagcaggaacaaaaggatctcatcaagaggaagaaggagacgggggagatgtgttggaagaagaattgccccaagatcttgtttgccaagatccggtgcgaggtcagtggtgtggccgacgaatctttgcgccgtgtgtgcgagccagagtagtgggctgatctcgccatctctcggggatttgggaaactcttgtttttcccgtcgacactaggcgtgtaaacacgatttctgcgcacctcatcgatacccgaatcagcacgcctgtccatctctcaccagcacacccaaatctacctcgtcggaacagcctgccactcgctctcagcgtgcgctagactcgaaactggcctctgtgaatagctcgaacccgttgctcgccaaactgcgtgcgaaacaagcagggaacagtaacctcggaagtagcgcttcgatctcggcctcgtcctcaacgtcctcctcgaaagcgggcgtgagcggtcaatccctgacacatctccctttcggagcccgaagagacgcagctctcgcagcgatgaaacggctgggccagtcagccaccccggatgcgtcgtcgaatccgagttcaacggcagggagtaatgacaagcttccggtgaaaggggatgacaagatggacatggcgagcatgaaacaaaaattcaaactggggccttcgacgacggacaagtgagtcgccgtcctgaacgctcactcctttgagcccatccgtccaagcgctgatccgttccgccgctggtttctctcgctcgccaggcaagccgccgcggaactcgcatccatcttcaaatcgctggaaaaccggaataagaagggtctcctgaatgatacggaaaaggtgcggtacgccgagttgtgcgccgagagggaaaaggcgagaaggatggggatggggagtagggagggggagccccccgacagatccacgaggcccgacccctcaaggtcaagaactttggaatctggctccgatacgactctcgatcgggaacccacaacatgtacaaagagttcagggagctctcccgggtcggagccgtcgaggctttgtaccaggacttggccgctaggcacagggctaggtttaggtcggtccacgtgagtcgcgcccgagatggagttttcagtcaatctgagctcgatcgctgaatgagccgggttttattttccgacctttggggtagatcttgagggtcgccgagattgagaagaaggacgacgtcaagaggccttacatccgtcagctcttggagcccggtctcaagttccctcttccccacaggcgtgagttttaggttgagttccagccctgggactgaatgctgacgtcgatgtcgtggttcttttttttcgtaggcaccacctccaagggttggttcgctgccaacaggcccgccacctgggcttagagaaatcactcgaccgactcgatcgaggggcgtctcaccatggacgcatctcgtgccggagacaggagagggatttaggaagagagcgtggcgagcagcgtgtgagcggaggggacgtgggacctgtccttggtttcctgtcgtcttcgccaccgccgccgttgctgctgctacgacggggaagcagctcgagcgggggggacaagggattcgatcggtcgtgtctgttctttgtttctcttttttaggctcgactcgagcgcatgagtggatgggatgaaaagcacaaccacaagagtttcgcgagaggcgtggcatggctcctcttgaccggtccagtgttctcgcctgccgacgtgtttgggtgagacggaatggaccgtgtgtgcgaattcgaatacgctcgacgttcgagctgccctctccctctagactgacgacgacccagcaagactcgcgtgtgattgtttcagatgcgtacttggctgttgtgaggaggtcacctcctggtagtccgtccgaggggtttggtttgttttgtttgtgagatcgcgacgatcaaaagaccgagatcgcgagggatagtcgaacagcagcaagcgatagatatgaataggtacatgcacatccaggacctcgtacgtagcaattgcaccgaagtcatatatcaagagatagctcgagcaaagctgcgctcaggacatagtttgagcctggatcgtctcaccggtcatcttcacctcctggcagtgaagccgccaacgacacgatgcactcgacgcaggggacgcaaaacatcttttcccgattgtcattaccgtgagcctgcagtggggacccgtcgggcatggtcagtcgcactgcactgcacttcactgacgctcgtatggcgcggcaagtagtggattcctccaaaaagccttgttggaggaagggttcaaacagctggacgatttccaaggagtcgacgccaaggagctcgccaacggtcagtcggaaaggcgtgctgccaggttactcgagcagtgaaggattgaccgtgtctcgtttacctgtgatcctcgactagacttgaagattgggagggatgtagcggaagatattctgaggcaggtggagagttgtcgaggtgagtcgcatctctggctcggatcgatcgatcgggaccttgtcgattgacctctctcccgctcatcagccggcgctcttcgatcgcagattccaagatcgacgcccatgcccgtcacacagacgcatcaccaccttcccgtcgcctctcaacccgtatcctcgctcgttcactcgagatccttaccgaaacccacctggtcatccggtagcctcgccatcgaccacctctttgcgcccctcgccgcactcgctcgagccgcagcgatcgctcaatccgaaccggaaggggaatcggaatcgggaacaggaacgggaacgaaacgaaaagggcatctggccagggtgggcttgcaaccggggatgatcgtcgagatcgcttcaccccctgggggaggaaagacgagcgtgataatgaccctgtcgatgaacgcgagggtaggggtcgagggggatgtcaccgaggacgaagtgttggtcataggtgagccatacgtggcacaaggtgggagtctcatcctaatggtactgtcctcgatgcaagacacggagggcagtctaatccccggtaaattcaaaagtgcaactcaagccacgctcggcaaccggtcgtcggaaggtgagtccccgttcagccgagccgcgatgatgcctcgctgatcaagccatgtcgtcagcctcgatcgaggacgtgctcaaaggcatccatctcgtcagggcgacgacgcagatcgagttcctagcgttttgtcatacgatcgaaacatggttgagcatacacgacaaggtgggcacgtcgctagggccatgacgatccgggtcgattgacacgcccgaccgactcgtttgaacaggtacgactgatcgtgatcgataccttgtcgtatcattttcgacagcccaacaccgacctgaacatgaaacgccgctcgatggacctgtaagcaagctttcgacagagatgccgataagccgccccgcgctgatcacctcgtctcacgatagcgtgaaacaaaagctcgccaaagcatcgacgacgtatggctgtgcagtcgtcgtcgccaatcagatggccaccaagatcttgaccgcagagaacaagccggcgaatttcgatacgggagacaaggccgtgatgatgccgcaactaggtaggtctggcttccaacagccagagccgtgttcggcgattgacgactggcgttctcaggcgatacgtggatgcccccaaagacgatcaaagtggtcctctttcgttcaggcggaggctttggcgaaaggtgagcagagcgtccggtcacgagaatcctgacgatgtcgctcaaatttcaaaatcggcctctacagacacgcattcgtagcgcgacggcctggcgagactgaagatcgaccttgggcgcagttcgatatcgatgcaagtttaaagacatcgcatttgatgcacacaatcattcgtttgctaaccccgattacgtcttacatcaggaccacggcctcgtcatcgatgtcgatgcgccagagaataccacccaaggacatccttgaacccagaaagagatctactactacccggacgaacccacgaattcatcgctccgaccagaacaacttggcaccacttccgggcaacgaatccggttcgactcccgatctaaatatgctgctgttccccggactcgagttgcccgccgtcgaactgaggtcggtgtccctcggacagcggagaccggcgtgacgacgcttggtcatcggataatcggatgcggtcgagtagaccacttcggtttggacgtgcatggtcaccttgttcggatcgatgacgccggtgtttttaagctggcctcgcattcgttctcgactggcaatagcaggtcgacaaaggaagcgtatcaacgggatgcacacggacgctaccaaccttggacagactcacgcaagggtcaagtgcaggatcgagatgagcgacagcttggagatcgagtagactgcgatcgcgtcgtaacactgcaaagtggcgtgtcagcaggtcagaaacgctttatgaccgcgtcgtatacgctgctcaccccagagatcttgtaagtatgtagtccgatcgaggccgcgctacagagcgtggggaagagcatcgacttggccgaaatggtgatgtattctcgaatggcgtttttggtcctgcgccgccacccagatgatcagctgaattctcgcgaactcggttggagaaggaagcactcactcgactggctttctcggacgtccctgccgagttgttgatcatggtccagacgctgcctacgcagatgatcaggtcgaccagaatgttcccgctaccggtgccaatcccttgcgaatgagtgaggtccaacaaaggaaaaccatcgcctcatcgcactcacacataggacagtatgatccacggcttgacctggagggcgcctccgttagtgatacctccgcttcccaccgaaaacacgtcatctcaccctcttgaagtaggcgtcgagagttgacactttcgggtcaaagatcgaggttaatctaggcatttcggcctgtgaatacaaggcgctgccagtcaacccataggccaggggtcagtcgattgttccggcctcaagctaatagctcgactcacacggtgttgcatcccaagcacaacgcgatggctatccccaacccgatctggattatcattctgcgtcgaccgcgatcgcgcgtgatctggaccatgcgatgggcgtaaaggcattgtacgatgcagaggacaataccaccgaccaagtttgtcgagtagagttgccactacccgaaaaacgacacgtgtgtaaatatcccgacgttgcgacggcgtggaacggatagcgagagcggacttgcgtgcatgttggcgagcgaatttagtcggaagatctcgttctcgacaaatcccagcagcatctgcgagtgggcgattgagaggtagctaggtcacggaacagtcaactcagctgtcagcaggtcattctgaacgatccactgctcacagtccaacggtgctagcgaatgtgatggctacacgttcgtgcttcggggccggtttcttgtagtaacgaataagctgtagcggaagtgatcggggtttcgtcagttttttgatcaggctgctagcagattggttcagaaattgttcaccagatgcaagcagtagccttgctcgagaagctcgacccatgtgcccaagtaaggaccgagactgcgccagagttcagctctatcccagtcaaagtcctcctcggcgagctaactcactagacctcccgcacatagtttgcaaacacatcatctgggctgctcccttttgatatgtctccggcggggtcgtaagaatttctagcagtaaagttcgacatccttgctttcgacgagtctatcacgacgactatcaagcacgactagaagccgaatacgacacctcagatgcccaaataaggaagtcgaaagtcggggtatatgagtgcaccttggatgtgatccacgctgtaacaaagtcctttttgtctggatttctgatggatcttcctttctcctgtcattacccgagacgttccaaagcttaaacgccaagcgtgtgatcgtgcactcggctccccttcgaaacgcggaaaggaatgtctcgcgcgaggaaaggtagcaaggggcgcgaaaataaaaagaagcgttccaatacgcggttagaccacgttttgatcatcctattcgtgcggtggagcaaggcgagagaacggaaggatctcgctgaaaccctaaacgggcaggagggaggtgatcgtcaaagtttaaaaggatcttctaatcgatcgaggcgaggtttcatcgttccttcacttgctatatacctatagcatagcatacctttggattcgcgtaggaacgcctctttgatcaacgatcgaggtaactccccaagcctcgcaatcgatcatccatcattgaatataagtggtacaaacccctctccccacgatcttccgcgtcgcccgtcatcccagatccttggacatatgataggtaatatctggccatgtcaaacatcggatctgacagcgcgggcgggaatctcgtcggcacgatccaggaagcactgtaggcctgtctctgggtgatgtgacaccgattggcagaccgacgaactgatggaacgacgtcgtccaccgtcagtaccggtccttatgtgggcacattcgcagagaccatcgagacgggatatatgttacatttggtaagtatgagcttcgtcgtatatttttattctccgttcgagtgacggtttgctacatttagctcaacgcatatttgtggaccaagacaccaaagcacgaaaagctgctagtggtccttgggactggcgttgccatgagagctcctgcccggattgaccatgcacgacttattactacaggtggctgataccattcgaagcagattcatactcgccagccatatttattatttgctgtggatgaccatggagggtcacgccaatctcaactatttggtcaagatccccgtcagtgcaagactttctctcattttctcgaccttccgcctaacgtagcgcgactttgtgcagtggatgatctggctcaccatccccctgagcggagtagtctccctcgttgtccaagccatctacgcatacaggctcgtcaggctcaacggagacccattgtggatgaagatcggattaggggtcctggtcagctctgcgtttgcttctagcatatcgtcagtatgcctgtgatctgccgacgaagacaagaagctcatcagtgaattgtgaaccgataccagggtgactggactgtcgatgaatatgcccaaagtcaactcggtgttcagccctagagtcaaggacctcgtagcctattttgatcgagtaagcttcacgttcgactttgcgtcgtcccgattccgagatccaagctgatgcccaaagtggtgacctggcgattgctgatcagactctcccttgggcgttaacgatgtatggttggaacgtcgtcgtcgatctagttctctgtgtggcgacgtgggcaacgttattcaggaagaaacaaatgggtctacaaaggtaaggccttttcccacctctcttctacctagatatcagctgaacacgatatcaacaggactcaacgggtcctcgagcgggtcatgcaaatcacctttcaggccatgatcttcccgacactggccatgctggcgaccctgatccttcgggcgtaccgctctttaggggcaagtcttccgatctgtctcttttctaaaagccactaactgttaatgatgttgggaatctcgattgcagtcatatgatgcaattgttcattggagcgtgaacaagttgatgatgctgatatctctccttcacctcttgcttgcgtgagtccgggcccctcgcctgacggcttatcgtcaccgcgatagattcgctgatatttcagtatcgcctatgatccatccccacgaactctgatgtagccgccgtgatatctcaaaggcaatggagggcgggcaagtcgagagcatcgatctctctgacctttcccaacaagcctcgggatcacgcttttatcagagtaagacaccccgggaagacggtgtggtgatcatcggacccgaagagctactggatcggaatccgaatgtccgagaaagtgtgatccgagatgaagcggaggcgggggggttcagggggttggaatggcgaaaggggattttgtagcgatgctgactcgggtttgaccgaagtggaggtcgttgatcgatcatgtcattcaggtataaggggttcgtcagtccaccttggactgcatcggagcttacgacaaggctcgataagttggcatgacatttgactcggtatcaaattgcaccattaaacctgaatttcgagttgtcaacccaacagacagacataaccgttttggcctaaatatgccggccacgaaactcaccccgctcgcctctttgcgggtctcgcgatacttcatccctgcttgcggttctttcccgaatacttcgattcatcccgaccgacctctgacgatttaccatggatgtttcccgcctgcatcattacaagcatcctcggtggaatcgcacctccgacacgttggagtggtcgagcccgcatggagatacacaatgtacacgcaacatcattaccacagcaccacgaacgaggtcctggtcgtcgtctcagataagcgggccgagctctgtttcggcggctcagaggagaatggggataaggtcgtgctcgaagtcgggaagggggacgtgatgatcgtccccgctggagtcgggcacgccttgttgagagagctgggaacgggcgggggcaagttcgagatggtcgggtcttatcccgttggagccaaaggttgggatatgtgcacgggagagcacggcgagagagagaagcagtggaagaatgttgagactgtcgaatggtttgagagagatccagtgtatggggaccaagggccgacacttgatccggccgacgggaccccgccaaaggtcgagcggtgattctgatgtgataggtagaactgcccgttgtaccaccgacggtagattgctttatgctgtatctctacccaaatcgcatgtctacctcggcccgtcctatatgctgcaggtgcagaacctcgttgatgactagccctttcctcgtactcgacatgtatctacctacctttttcgctcttttgccgcttcgcgcctcgcgccgatcgtcgatcgatcatctactagcagctagctacgtgccttcaaccaactacaacctaattgaacaactgggtctctacgcatctatctgcacaccgagggatcttagcccatacgataaatacttgctcggagtctcacatcatgtcggccataccccccaattgcgattcctacttcatctttcacggaacgggcacctcgtctgccctcccgctcctgccttgcattacctcggcagataacgtcaaggatatcgagtgtggaacatgtcgagcctgcgtggacgatacacaacatgaagggtggaagaatatcaggggaaacacgggtgggatatggaggaagaaggacaagaacggggtgtggaagtacgtgctaattggccgctgtaccaccttgttatcgaacgtgctagtcgagctgatccgtcgtcctgtctcacaggaacattatcatcgacgtcggaaagaccttccgacagaatgtgagtgcctatctcatcggactatgagtatactgctatgtggtactgacatgaatctgcgaacaggctctacggatattcatggaacaccagatccgaacggtagacgccgtcatcctcacgcacggtcatgcggacgctatcgctggactgggtcagtctgcgtctttttcatttgtaatattactgtcttgactgatgcatattcttcatccctcaatagacgatcttcgggcgttcaaccagccttctacccctggaggacctaaaccacccccactcgccatccacctatctgcccaaactctgcacgccatctcattgcaatatccatacctcgtcgacaagaacaaggctacgggtggaggggatgtgcctaccttggattggagggtgtggggggacgagatgagcgaggaagaaggagaaggggagagggagggcattgacgttgccgggatcaaggtgttgcctctaaaaggtcagtctcgatcacgttggcagcatcacatcgatgcctggtttcagcagctcaatgtatggtggttcggtagtacaccacgggaaatactttacgccgcccgacaaggctcaacggctcgatgtgccgacaacgcaaggctccaataccccggtacccaacagcaaggcttcgcttacgaccgcctcgtcaggaacgaaccgctctgatctcgactctatcacatccgcaccgtctaccttggaaggaatcgtcggcaagctgaccggccttactgggttatccagcgtggcaggtcttgaagacctcgtgaaaaaggccgagatcaaggagacccccttctggtgttacgggttcctgttcgagggcaaagtcttgtacttcagcgacacatccttcatccccacgcggacctggaacaagctgtacaaagctgtaggcggcggagagatcggggagaacagcactgcggggcctcagccgaggttgttgcctttttccgccgaaacgccggatctcccggcgggcaagatcgagacgttcatcctggactgtctgcggatcagcgatcaccccagtcatctctcctacgtccaggcattgtcgctggccatgaagaccaaggcaaaggagacgtacttggtcgggttcacgcatccggatcgacacgccctctgggaagacgtcgggcacgtcgtccagggtcaagccaaagaacttggcaccaagtcgacggacgaccgtgtggacgaggacgaggacgagctggacgtggccaagaaggagttcagggacaagatcgaacagagcgcaagggaccaagagttggagcacgtctggcggcaagcgctcgagtggaagggactcgtccagccagctttcgaccggcaggtgatccgatgcgattgagcataagcataccccgtacaagtcatgtgtactgcgttgttttgcgagaagtctgtccgaaatcatagatgttgtatgcggcaatcgggtgggcgaggacgatgtcagaattgcctgactgactagggaatcgatgtcggcccggatatgtagattgtcggtctcgaccacatctttcaaggctgtacgacaacttgtgcttttctgacggtgccgtatggtctgtgatttgatggtacaatcgaatgttacagtctctgtaggtcttggcttgcgggatccgatcttgctcagccttctcccatcctcctaccctcccgtctctcgtccgtctggaataatcgtcccgagtccttgggtcgtgctcgtgtttaatggctcaagaacctccttccaatcttcctcctacgggtcaacattgatagacctagctttccacctctcaacctggcgaggaacccgtgcttcctctttctcttgcgttgagaaggctggtactcggcaccgtaagccttgaagcggagttgttgcaggagaggggacgccgagaggaggctaggggaggtgcaggtgctcgaaaggagagtcgatcggaagttgatcagccgggaaggcgaggcgaataccgggatggacgtgggaaccgccgtccttcgtacaaccgaggcgatggtggagctagatgctgatgccaaacttccactagaacggagggacgctgcgagcgttgaccaaggtagtgttcggggcatatctatgggtgtatcgaggtggatgacggtaagtgacagtgttgtttcagctgacaatgggacttgcctgcaaagatcgaggatgtcaatgtgatactcctgttttcttagtgatgcaagtggaaaggagatgctggttcaagtctgcgtgtttgagcaggacatcattcaataaatcatcaacgcaacctggagatcctccagatgcgagatgagcgctttttcgatcgaggagaagattacgtaatcgagaattggctcaagatcagatagcgtcgtgaatgccgatggtcgtttgggctcctcttggccagatgatattcaaggacaacctctcgaaagactctctggtcgtaggcgggagcacccaagagttgtgagacctgtggatccggaggctctgcctcaaaagctgtcgattgactgtcgttcaacgatcgagtctctgtttgaccaaatgcgacgcgcaccatccaggcaggactgtgggagtgcattccataccgtactactatgacatggcaaactaaagcacagtcattacatcgagtccgatttcattgctatgctggtatattccaattgctcttttcgtgtgttcctgcaagcactttatgcgtcatatgcgactcgggcaccgccccaagcgaatgggtatttcgattggtaaaagtttctcagactcgaacgagatgccagacgagaaatggtagcgaaggatccacccaactgtgggggacaagggaatgtcagtaccgatgttgagtcggagaagctgagcgcgactactcaccacgacctggtgaaggttgtcgaaaaagtcggaactgtagccggggtatacttcggacgtttcgaagccaggaaggccttcgaacttggtagacgtccattcccaaacaccaccattgtgaccgtatagagttcgtccacaagagtcgacgcgggtgttcgtagcactatgaaaaggtaccggaagggataaaggctcaggctgcagttttcaatcgatggccgatgcagttcaaactcacgggataggatgccatcgcttaactccaacgttggcactcaggccagccggtctgggtccaacttccgactcccacagcatgcgcaattcaggttcagtggggattctgccacccttccacttggcatacgccgcgagttcctcgccaccggccatcagaggccagtgttgggcgacggtcatggggactggtccataaagcgtcttgacctgaggtgtcccttcagagttgtaccaagatccaggcatctcggtaaccccggtctgttgcatataggtccagtagtcaccattgctgatcggcaggctatcgacctggaaacccttgacgcgaacgacattgcgagggttctcgttgtcccaaccaaattcatggtcctgccattgacttgaatcgttttcgaaaagcttatcctcggactcgcggtcatcgtgacccagttgcactgaaccgccttctatctgcaagacgatgttctcctcgtgtgtcgcatcccactgccttcccagctcctcccaagatggtcgagggaatccgggcgggggcagcgtttttctcgactgaatgagcatgtagagcaaagtctcggcgtggaacgcttcgtgctcgtaagtcatccaaaggattcggcccgtccggcggctgtaggccttcctgccgttatccaaatcgtcgtaaagatcaagaacccgtcgtctaacgcgatcgcggaatgttaggatctccttgagcgccggccaatcctcatctttctcgggtacggccgaatgatcgtgacattcattaggatcgtcgacgtgagggtcgatgcccctttcaaagatatccttgaagttctctggctcggtgtgtttgccgtccaggaggcgagtaaggtgaatgtcttggaaagtggggatgtgaccgagatagaagaggcacttgtgcctcaaatcgatcggcttctcatgcagcatcggttcgggaatcatacccaaggtgatggtgtcccacagcttccacagcgctgtccactcgtcccgggtggggacacttccgaaccgctgagactcgagcggttgagcccccttgttcaagctgagcgtcttggcagggaagaaaaagggcggcttcctcaacagccacaagcggtagttgctcttcggatcctgccaatactgaacggcaacgagaccagccttttcaaatagttcaagtgattccgtcattgaatactatcgttcgatcaagatggcgttagtttgatgtgttcggcactgtccctcccggaacgcaccttcaagctccactcgatattcagcagctcgcccttggccacagtgaccgactcgcgccgcccggtcttttcagtccagaccacctcctggtcctcattcgacccgtagtaagcctcgtgacgacccatcttgacgttgtagcggctcttgtagctccagctctctctcctcagtgtcgacgaggtccgtcgcttaggcgaggtcggcatgtcgatgtcgacagcgtcttccatctcgagcgcctcggcagcaacatcgatgccgtgaaggataaagtccctagtcttgcctttggggtcatcgtacgcgacctcgaccatacgcttcccttcctcgtagcggatttgcgagggcaaatgaccgttgattgccgtctccttgtccgaagaagagggtctaccgtcaagaccaagcagcaggctgtcgctcgagcccggacgcagcggcagactagcaaggaagggtcccgcggattcgcgatcgaagtttccaagggacgagcccaaaaacaagaaatggacgggtcggcggtcttcgtccgcggttacgccttgaggcagactcggagagagcgactgcagtgcacccaactccctagcttcctttcggaacaactcgattctgccaagagcataggcctacaggagtgcagctcgtcaactcccgtttggcgatcacggacaaggtcgtcagcttactaggtaatcaaagtccagttgcgcttcctttccactggcgagagcctcgatctgttcctcgccctgcacaattccccacaacgtccagaacgcgctcgatgcggggctccatagccggacttccttttcgagcgtgtcgacgcgagcctgatccaccttggccatgtcgtcgatgtcctcgtgcccgtttcgcgaatccatgtggacggacaagtaggcacggtagaacttctcacgttcttcaggcgaagggtaggggccatggtaagtcagcgagtgtgcgtgagtctcgtgatgatagtcggcctgccactcgtggaagtgattggcgatatcgtatccgcgatagttgggcgcggcatactcgaagtcgatgacgatgagctggtggtgtttgggtgcaccgggtggtagggtcttttccaattcgaggatattaccgtactgcgtgtcattgtctatcgcggtgcgatcaatgtcagtcccgagtctccgctaatcttgcagaccaaactcacgacagaacaccctggctttgcccttgccttcctgcgcattgacccattggatgtactgctcgatctcgccctctagcctgtcgaggccgaacttttgcaagaactctctaccctcaggtacagcctcgagcgccacggcagccttgacagcgagagggatccattctctcagcctctgccaaactgtcggttctgaccggtcttcaaagccgagtgcgtcgaggtcgaccgagtgcaattcccgcatccgtcgagcgatgagcaacgagcactcggggtcacgcaagtgagcgggagtgagcgcgtgagaggggaaaaattgttcgacgcgtccgttaccgaacgtgccctcgatcctcggtccgagcccatagtcggcagacaaggtgtgcaagatgcgcaactcttcgtcacgctcaatcagggtcccagtcgacggcccatatactctgatcagcaaagttgggggtgtagactcgctagagcccgggtgaatggattcgagtccggggatctttggagtgagcatgggagacattgtaggttgagtagccttgtctttcgggttgtatgagcagaagaagacggcgttcgtcaacgctcccgaaaccttgaggaggtgaatgttgtggttcttgatcgtcgatgatgaccacattggcaggcgctacagagttaccagttcaaccatcgtcagccgtcactcgtctaggtgggcggtaccctagctgcgactcaccaattttctcaacatgttcaatatgtcgtctttgaacgaatcccgtttccacccgaccgggtccaagctcacaccggcatgcctgacccccttgaccttgggcccacgcatatccgctcctccgctcgtctcgctcctcgtcgtctcggtatcggaatgatcctggagttccaccaaaggaccgtcatccagcgaaaacgaattcaaggaggacatgctcgtccgtctccttggaccggattgcgagcgggatagttggtgagtcgtcctcgggaggagcaagggagaggctagcggacgactgtttcgacgttgagagagggtcgaggcggcgtcctctgtcaattgggtgaaagacgcggtcgtccccgtcgtcggggtgtaaggtgccggggattcgctgattcgggcacgagcatcttgagctccgttcgcaggtgctgaaccgttcgagccgaaataatcgctcttctcccgggtagccttgatcggtctctcttcctgcttctgttccgacttgtcctcgccggtctcggcggcatcttcagcggtactcgattcgagcccgccctttttgacaaactcgatccctcgttcgtagtctccccagagacccttgatgcggatcttgccgtcgaataattcgcggttggtttcttccaagctgtctagcgtacggacgagctcggggtgtgagaggtcgagtgcgtgatacgtgacgggcgggttggaagggtcagcgggtacgctcgaagcgagggcgttgagaaagtgcgaagtcttgcggagagatctgcgtcgatcatgtcatatcacggatgtcagctgcatatcttatgatgatacgacgtggaaagactcacccggcgcctaattcgacgatatcccagcctttacccttcttctcgccgtccaacccttcttccccgttcaccccgccattccacctcccgaccttgtcatccccccacttttcgcccgtatcggcctcgcctgtcttttctatccgtcgcatacgttcctgttcctgttcttgttgacgctctggaccttggtcccgatcgtcatgctgagccgaggggagcgcggggaaacccatctgtgatgcgatctcgtgcgagtgcgtcttgaggaggttgagctcggcttgatacaggtagtactcgggagcctcctccgtgatttgatcgtacagcctgagtgagatcgggttgcaggagcgcatactcagtatctcgtcttgagaacgcccggaatgacgtcgacatcgacactgccgacgcggggacgaactgacctcaaacccttctcatcgtacaagaccatcgtcggaatactccgtcggtacttccactgtttgtcctcttcttcttcacctgggatgatgtcctgttcggtcccccgaagacccttgatgatctcttcccgaagggtctggctgcccccaccattggtcggcgccgagctgggtagcgaaggtagctggatgatgtccggcgacattgcgcggggaagatatgtacggtatgtgaagcagtcgttgcacgtcgttgctgagggtctgcagtacagtctaagttatgactatgtcaagctgcttgtcacctcgcatcctcgacgttcgtcgtcgtcgtgtcggtccaagtccggcatgtcacggcaggtcggtcggtcgatgacatgagaaggggggatcggccgagatttgcttccgcgattgcattccccgctgtcccgcgcgggtcctgcacggggtccggcctccacctttttcggggaaaagcagacgtgtgggcgcgcgtcgcctccctcggattgacgtcatttcgttggaaagcatttcaggtctgaaacatgaggacctcgatgaaaccattccaagctggagtgcatacctcaatggtttctggaatggctctcaggaccattttggtcggagtcggacgcaatgctagggtcatactacttcagcattccactgacacttgggtccgtccttactgtagctatcaaaccgaggagaaccttcaaggccgcgtatgcgaagaacatgcggattggatgcgctgggataaagtccaatgtcaccttaaaaaaggtctactttacatcaggtacacagaaaatccaaaacgggatatgctgttcttacccgacccgcgtagtgtccatcaaggggaagacgacgagtatgccgcctcagaagccgggctaggatactccgagaatggaggaccgtctgcgggcatggatacagacatgtctattcacaaggtcccgatggcacgcgagccgatgcttcttcaaatgaacagccacctagttcggcaccagaagtgggtgccaagcctctgaaagtattgtcaagattcgcctcgatcgaattcgccggaataggaccacaagaacgaaagaaatgctgcatctgcgggcggaagggacgtgccatcaaccgagctcacagtaagacaggtggacgacttcgtctaatcgcactactgagggatgaaaacacggaagcgtggcggattgggcccaaaatcgaggggcgtgggatcttagaatgggcagcagtctacggttgtgaggctgggcatacgaaccacttcgacgatattgaaaatttggtagcgttcgttcgtgacgaacccaatcgcaacatttcaaggccatcagagcacatcgtgcatcatacggggggccaatcccgcctgtacgtgatgacggtttcacatgctctcagtctggcgccctcacgtccccccctaggatacgacgaggccgatgtgcatggtttctctgtttgagttgtccgaatcgtcatgctgaacaacgtttcgactttgggatttcgattggagaattgatgcgagtatcggtcagaagggcagagaattacggcaacacggacaatgtttgagaatggaacagtcagagagtatcaccaggagatcgatttataacaaccttgttgtagagtaccgccagtgcaaaaagacatcgtggacaaaagacaaagtcgcgacggaaatgttcactctcgagcgtcatagcaaccgacggcaaatcctttggtgaggctgaattgtagcggtcgttgtggctttgttgcacaatctttccgatcaagcaggacctctggatacgactccagaggaacgaatgcaggaactacaagagaaattcgcacatgggaggaattagttaaaaaataccggaatcctcacgcagttgcctacttattcgggattgtacctccggatccaccttgtgaagggacttggtcggaggcggacgacagcgactacgatgaacgttcaattgacccacgcatgctgtagtacctgagacccttcacccttcgctctggaagcggtgcatatatgatcagtacaccggacggcatgcagttcaacgacgccgatacgagccaagaaaccagggtggcgagattttcaaacccgactgaccctcccggagtattttcaatgcagcgcggaggcaaccctcttcagcagtccaggttcacagaaaacgacgtcgacggcaaccatgatacgtctcgaaatgatggaaatcgctctgaacaagatcgttggaagcatgaagaccggtatcgcgaccgccaaaagcagcggcgtcgcattgacggaatggaaggtcacgaccgcgcgcgaagtagcggttgtaattcgagcgaatatggaacctactaggctcagacaatattaccgtgagatcaaggacaattacccaaggcaggacgactgtgtaagatgaaattacacgcaggagcccaattctagtcgtacttgttgtattattactcgcgaggtctcttgttactagacatgtgttaacggggacagaaaaagcatggttttcatgtcttccagacatgaacggaaacctataagatgtctggctaggccgtaaggtagacaggtctgaagcatattgttgggatgctcatactcatacattcctctcaggctgacataaggcagtactgtccgtgcctttaccatcagccacagacagcggtgttgcagtccagagaccaacaagatacctgacgggcggatcaccctaatatgcaagagttgttgagcgtgtactgccaatacaacctttgcaaacgcgttagttaatgtacgtcgatactgtggtttttctgatcaggaccacgtgaacgctcatgatgtttcaacccgatgagctgaccatcaaagaaatacagattgcccgttatcaaccttggggctttcgctatccaagccggagctacccagcgctataaactcgctggaagagagacgttgtgagtgtgaagaattcccgctgaattgtcgtacaattcaccttccaagtagtcaggtttgatcgcatgtcctttgctatcctaagctatctggtttaccagattcacatccgagcgatatgcacacatcgggacggcgccacaggttcgcttgaattcgatatcgttgagcgagtcgagtccggccgtttcgtagtgttgttaataatggtgcagtggtgcgaacaggaagatagcaaaccgaagagctgaagatccgccgatctttgcatggtgtagaatcataccatatttttacgtaaatggagaatgcgggaacgacgtactccttcacgatgaaactggtcccctgcatgagggtccccggccctatagaacatattcatcttgtctcagcccctgttatgaaaggaagggcactagcgactcgctggacatgctcaccatgccatgaggctatatgcccagattaagatctttatcgccgggaaaccccattgaccactgcagcaatcgagtaatctcgccaaaccatcgatctacggggcgtagctgctcaacctgatcatgccgtggtatcgtgacgcgagaaccagtaatcggcgacgtggcaaagacaggagaccagaaagccacactactagtatctcgtcatcaaaatcttatgaccctgtcaccgacccgacgtaagctgatcgacatctgaagtttcatccctctccctcctgcatatgttcacctgcctgtacaatgcgcagtcacttccaatcccgacagtccacccaccctacatacccggatcaaaattacaccactaggacttcgtgagaacgctcgatctgatcctcggtttcgcatcgctcgactgacgctacagcagtcctcctcaaaacccgagcactcgcgcggatacaacgccaatgcatcccgattgcgaagatcgtcacagctctaggcatagctcaagaaactcctatttcatcgggactaacatcgatcccagccaatccgagcaggaggccggttctcgctggagacaaaggggagaagaacgataccctgtcaaggagtcgcatcggggtaaagggctatcctacgactgcctgtactgcaaccggcctggccgagcgatcgggcatccgaccgaggagcgggatgcaattctgcgtcctttcgtgctgtgtcaacgtatcatcggagacacaatcggatttgaaaagccgaacaagcacttacacggtccaggtgatgaggatggatcttgggggcatgcttgcccagagcacgagcacgatctcgctgacggctggatgcgggcttgggaagagcattaccgggtggttgccctagagcagcctgagaaagattgctgtctctacatttttgctgatgagacggcattcagcgattacaggaccaggaatagggtcaaaagaagaaaaagaaaactgcagacttgagatgacgtgcgatccaatcggtttgacgaattggtaactagcggctgtgagagatgtaggacatccatgtcaacacatcaatttatcctcctcctgtaatatacgtcaatcctgggcctcgtcgtacccgtccagatgcatcgacaccggactggtctatcgtatgccacaggatgcagtcagtcgctttgaaaatgaatacttttgggcgagtcttgaatttgaacaataaatcgccttgtcacagggcggaaatcaagcgacaggaaatgtatcaacggtgaaggcccgagcgagagtatcctctctcaaccctcttaaacaacatacaaggcatcaaggttcacactgttctttctgatcgcacgatcacaaacaatcgcatggagaaatacagtgtcattcacggtagcagggcgacgagaatcgcgccattgtttcaataagcctctggggtgagcattactaaaggaaggttgattgcggcttgttacatgacgtgcttcagctaactgtgcagtattatatgtagtgcaatccgtaatcgattgctctagagaatgcgactgtcgttacgtatatcatgattgcagctgtcccgaccagcgcttatatcctcgtttactcagcttcctggtactccgaacattctcgcccgcccagcaggattgaggtcatccaccttttactttcctgccatcggagatgacgactcctccctttacaagcttggacagggcactccagacatcctgtctctacagcgactctgacccgactcgtcgttgtgtccacgtactacgtacgatcaacacgactctaccttgtgagtttaagaagtcatcgttgtaccttttgcatggtcgggactgagaatgttgacagaagctcgaccgacttgcggagaacggccgcaaatttcctggggattcacacgtggtcgaacgttgtcacgcttgcccccatggcgtgcatcggacaagactgtgtgctcgaaccgaccccgatacccaagctcgtgttagggctctgcagcacaaaaggcggtcctgatgggcgggcggtatgggagtgggaaacggcaagcgaattgtttggcgtgtgcgagtggatgcgtttctagagcgcaccgagaacgagcttgcaagcggggaatatcagccgttcgtcgagtcacggttccaaaacaaagtcgtagaggtctacttcttctcttcttgggcagacatgaagcagtatatcgaggcgggtggaccgaatcatgtcgattacggagtcgtggggtcgagcaggccagccacaacgtcgaacatcatgccaccacccagggttgattcgatgctttcctgattgtcgcttgcaaagcggtaccatccatgtcaaaatggctgtggtcccgacagcatctatcgttgcactttgtaatcagaccggatcatcgagacagactgtatgcgcagccatctcaaatcccaaaatcacttgtatgaattcaatcataatcgactctgctagcagagaagcagtcgtacaaacggacccgaatgtctgaggattgatgagatgcccttaggcgcccggttaagtctggcgagtcgcactgcgacccatatcgacgcggattccagaaactaatcaaggagaagagaagaagccatcgttattcctgtgtttcgcaagtcggtccggttggtccgaagagcagacaaggagaggtggtacagaaacagtcgaggtgagagtcgtcgttaccgcgtttcatgagtatactggcgagatccaagagggaaggacaatttgattgtcgcgtggaagggaatcctctagatctcgtcgcagtagggaagatcctcctcattcacgcaatcggccgagtcatcaccctcctcgcagtattcgagctggaaagaaaggaaggcacacgagatcagccatgggaccactcgtacaaccatccaggcccagaaacactcaccccgctgatgctcgaagtctcctgagcaggagcggccgactcggtaacagtagcccaaacttcggcggtgctggtgatttcctgaacggcaggacccgaggtgggcacattggtaggcaagatcgtcgaggtgacaggctcgttgtcctgctcggtctgggtcacgttggtagcgaggatgtaggggtaggacttggtggtgacgcagagaacctggccgaggtagatgttggtgcactcgttgttgatctgggggttgttcttgtagagaacggtgtcgtcgagttggtaagtctcggcaattcccaaacaagtactgcgagaagagatggccggtcagtctcgcccctgactgctcgttgaacagacgcgcgcggggactcactctccaccgacaacaacgtggaccttgctacaatctgtccccctctgtcccaaacagacctcggcaccgatcatcaagttggagcaagccgcgtcgatatcggggttggcgagagcgaattggaaggtgggcgaagcatacttcttggagatcgcgtcgcaggtgtcgccggcgactacggtggcgttacgggtgcagtcctgggcttggactacggaatcggttccgaacagattagttacggaagtgatgagcagtcgacgctacacctacccatcatgcccaaaccgagagcggccacaaggacggtcttaacgttgaatccaaacattttgtatgaggtagatgtgatgtctggttgtgattgcagaggtgtagggctagcctggtatactatgtagaggtgaaaggtcagccacgaatctaagctacacaccaagccgagcgtacttggtttccagattgaggtgagactggaaagggaacttggaaacgggttctgtgcgtgtagacgtgtgtggtggtatcaaggaatgtggtggtgttggatcaacgagtgtggggggccgagaaaggaaacgggaacaggaaagagtctagtgtagggtgtctatattggcaagtccgtggtgctggtctttggtggtgggtcagagttgaatgtcgtcgacgctgtcgagaaggtaggtagctaggtaggtaggcgtgtgtggtagttagtgaagcgagtgtggtggtgtcaatgtcgagaatccctttgatgactttgtcgttttgatgatgatgatgatgatgatgatgatgatgatgatgatgatgatgatgatgatgatgatgatgatgatgatgatgatggataggttgagaaagaaggtattccgacctgggtggatatggccgtgatctttcctttgttacccctggtggtgtccccgcgtttcgtctcgatcgtttgttgttcgtgtcgtcgtcgtcgtcgtttgttattgttttgatcgcgccaagggcggatcggcacgcggcacaggctgacaggccaccgttccgggtcggatggaaggttataatgaaaagccaccgacggtgcaaacgcgtcaaatagcagccgcttgttgtgcttcatcggtcaccgcctaccaacgggcgcgagccgaccggtagcgttcgccttcgaggagtatatcggaaggcaggcgctgctcaacttgatacccgattcccaacgtcatctcatctcggatggatggcgttcttctcgtagtagaaattcacgcaagtagaaattcactcaagcgctgggttcattgcgtgtcgcccaaatcacctgtcttggccaactctggccgaaccttgccggcatttgatcgccctcgttgccggggcgcgtccgggcgatatttacgctgcccctactggacgcatttctgatcatggcatcgaatccaaatgtacaaccccaaacgtttcatttatcccttgaacaaaggacttcacttgggatcaggtgtcaatatgccctgacaccttcgtcctcctcgtgaccatacgagtcatctcgatcactgtcgtcggctctcatcaaccatttcctgatctcccttttggccagctcgtccgcctcccctttagaactgtcgaaaacgtcgtccatctgctcgagcgatttgcctctgcggaaccaagatttaagagcaagaagagcacgcgcaagtcagcatacgaggaggttcagggcacttgaccaagacttgctgggtctcgggaacgaaacgccaagtccatattcccgctagacaggcaaatgcggcgaagaacaggaacgtaccgtagcccgtcttttggaccaaggggggcgtgatcaaaccctgttcacagagtgcgtgcgtgcagcgagtgggtcactcagccacaacaatgaagagacgctgcacactggccccggactgaccacaaagaaattgctcatccagttcgtacaggtcgcaagggccacgcccttggaccgaaaagacgagctatgtacttcagccgggagaagccagcccatcggtccaaaggaaattccgtaggtgaacatgaagaggaagatcgaaccgactccgacccaggcctggacaggataagcggcccagtcgtgcgagtatcgggctgtcagatcaatcgaacagtcatcagatgcggtaccgcagtgcctccatgacagcgaactaaccaatcatggcggcaacgatgacatgcgacaaggtcatcccgaccgagccgaccaacaaccacatcttccgtccaaatcgctcgatgcacaccaaggcaaccatgacggcaacgagttgcacaacattcatgattcctgacattgagagccggcgctcataatccaggccaagcgtttcaaagagcgtagggctgttgtgtgtaggaccaagatgttcaggcaaagaacttgggatcgtggcaagaaagtgactggagtcactacactgacctgtaatatatcaaagcgtttatgccgacgaattgttgaaagaacatgatgccaatcccgatccgcgtccgcttgatgacatcgggaccgaacatctcaacccaccccgccatctctcgcttgacatccatcgccaatccctgaccttcaggtaaatccggatgcctttcggtaaacgctcgacgggcgtgaacggcttcggtgcgaatggatatccattcggcctggacgcgagcatcggtctcgggtagattgcgcagacgcaccaggacctcgagacattcacgatctcggtcctggccggcgagccagcgtggagagtaagggaggaagaaaagtagagcagcaagaagcaacccgggagcgacttgaaggaggaacggtccgcggtaggaccattccccagtgaagtgccgggtgaagtaggtctgcggcagtaccgtgaatggcattcagtgggaagaaggttcttggaagacgtcgaggagcactaacgatgtagtacatgacgacaatgccaaagacaatcataaattgttcgaccaccagcaaagtccctcgaatattcggcggcgaaatctgatacaggaattttcgctcagcagagcacagacccaggatccaggatgaccgcttgcctcacctcggcgacatacattggcgcagtcgaggacaacaacccgatccccacgcctcccagtgctctgccaatcactaaagtgccgtagtgatatgataacgtctggatgatcgatcccacgatgaaccaggcgaggccaaccgcgatcgagatgcgtcgagagtatttgtcggcgatgaatccggccatcagagcgccaagtaatgcaccgagctcgagcaaggccgtcagaagactgaatgcgatgaatgaagctttccagaacccctgtgcaggtgtctttatgggagatggcagaccagccgcactcaccctttatcgaactcggcgccaacagaaacggttggatctacctccgggaataccctcaggaattgcggcataaccagaacgatcgagatcagaccctggtcgaaaccgaataggagtctgtatcaaatcatgatagccgattttgccttcagtataacgtccggtcccgcctacaacggactaaaactgaccctcctaagcaagccgaaatcgcgcataccaccaccatgcgactgctgaagacatcctgcaggcctgcgtacagacagaactagctttcaggattgtccttggagcggacaaaagagcgctgacgtaccgcttcctccgaaagcttgggacagagctgcttcatcctccaagagcacatgtgtgtccggatgtagcttaactcctaggcggtccagtgagagtatgtcgttcgaaaatagactgatgctggtgcggtcgtgcgaatccttccggttcgagctggtactttctcggtaaactctaccacgattcccagtgcctggaagtgaagctccttgcccgtcgtgtgatcgcggcagcggtacgtagcccgattgagtgggtttcgacgagtcgacccatgctctcaacgcgtccatccccggtcaacctgtaaggctggatgactgatcggaggtgattgatggaagaatcaagctagcatggagcgattcgtattgcacatggccctagaaatagagggaggacaaggaaatgcttggtgccagtcgattcgcttggatcaaggctctgaactgattgatggactgctagaccatcgtgcagaggtcggggaagaccgaagaggtgagcttccacgtcaaccgcgacgctttcttgttgcgaatcggcgaactcgcttagcgtctccaaagaccggtcgtcaccagctcacgcttcgaaaagaaggggttgtgaatcagacgcctctgctggggatcagggtgtaccattgcgcagatgtgatgcacgtccgcgatcagctcgccggattgatgcgggttcaattttgactttagcacgtattaggttggaattccgcgaaactttcgaagccagaagatgacgggacgcagcgtcacgtagctgggttgtcatgcgtcattgggtagcggaccagtcatcgcggtagtcaaacagcaactgcgtgtagcgagaggtcatccaccgccaaatccgtgcagctttgctaagcttgagcgaacatgttcgctcgttactgtccatcattgccgcccgatgagcgccaatcgaatcctctcgaagattatgctgctggcatctgtcgacactccttgttgagattgagatcaaaacgtaaatgtgcttcacgtaacgatgcccgagcaccacttgcgccaagtcgcagtcgtgcgtggagccggggcaaaatcctattacctcgagaactcgataccaacaggtcgacctccgtatacctgcgcaggttcccatcctcatggctatgtcagaccaccactttcgaacgccgagtcctaatcattacatattgaatcacgcgcagatagcttctccatcatcaccaaacaacacctgcttgccgctcctaaaagcgtgagtcaacgcgtcggcgattttagccgcctggatggcgtcgtcgatcgagacaggtacgactgatttcgaaaagacgggaaagaaagtcaactgggctattcagtcttttcactatgaagcagacgctggagtgctcacctttgtcgtctagacaacacgccacaaactcgttgatctcggtgacaaaggcctcgcggaagcgtttgtaatacgtcggactaattatcgatcccgcgtgaaagtgtgagccgcggaatggaattctccggcgcgatggggactaacgtcgattcggtacgaacgccgtactgatcacggatctcgacccggttgagcgtaggattctggaaggatcgagagttgaaagccggttgacgatttgcagtgagccacgtcgcgtttgaaagagcaggtgtttcccagatatcactcaccccgttgacgatcagcttgcgttcggtgccaaagacctcggtgaagcaatcatgcccgtgtaagccggtcctgctcaagtggaaatccaggaccttgccaccctcgaactcgacgacgcatacggcattatcggcatcttgtacgtcggcgagctcgggatgacgtacggtgaggcctgtcgcccagaccctcttgactcgactaccattcgggttggagggggagctagcggcgccgagtagccagcgggccatgtcgatgtcgtgaatgccacaatcgacaatcaatcctcctgaagcctcagagaatttgacaaagaagcctgtgcgttcgactcttcagttaacgcgtacgtttagcctgaggatgcggaagcaagcaggaggagacttgccagaagggtcatactggtcgtttgtagccgatttgatcatgtaaggtgttcctagcgacccagcgtcaatctgcctcttgacctccttgtaagactcgtcgactatgaatgtcacgtccgtcttgtaagctatcgatcggtttgagaaaggccttctagggagctcagactaacagcgacgggagagaccgaccataatcttgaggtcgggccgagcttgagccgcctcgaggacgggttctgccagcttcacgtcgatcgagatgggtttctccaaaaggacgtgctgcgttcgtcatatgctgagatcaatcgacccgctctatacgccgacaggccgatacgcttcctaccttgcctgcctgtagtgcctgaacagcgagcgatgcatgtgtagaggtctcggtagcaatgatgacagcctggacgtctgggttgtcgaaaacctcctggaatcccgtaagtcgactgatcaagaatctcaggagtcagtaggagtcttccgttggtgaagaccgagtgatggtcgacttgcctggtcgtcgggggaagattctccttggcccattccaggcacgcttcaatcgggtcgcatacggcgacgagtcgagctcgaggcgtaaagaaagcggtctacggatgcgagtaggggttgagcctctactactgaatgctgacagacgcctgaggtctgactgacgtttagagcgtgtcgtctgcccatgcggcctacgccgagaaccgcgacgccgagtcgagctggttcagacattgcgcggtcgatatgcgcggaatcagatcgaatgtgtttgaaagatgacgctcctgtttgtgaaggtggctttggtgtgtacggggtgtgggaatgcggggttgatatcacatgatccagtcattacgatcgatcgaggtcgggattcgaaagccggtggaggggggcagggcattgatggatggatgaggtgtctgattctgaagctggagcgaattctgccgatcaattccgcgaacgatcttccggccgacattgcccgtgagagacgcgtgacgagcggcaggagcagcagggaacagggcgggggcagggcagggccacgagccagaaggagactccaaaggaccaccaccgagggtcgaagaaatagtcctcctggatcctgaccactcggatatggaatagatcggtaaactcgatcgatctccaactcatcacctcgtctcgtcctgtggaaagcttgacatagtgtcagactcgtataccacctcgctcgctcgagatggacggggattcggagcagcagtcgtcgcagaagaacacgacatgcgaccgatgcaggaaacgcaaggtgctttgcagctgctttgcctaatacccgtataggcgtcgggcgagcactgacattcggtctcgactctcttctgtactcaggtcaaatgcgtgacgcttccgcccgaggtcgagagcgaaggcaagtgtaaaggatgctacaacctggacgaaccgtgtacgtacgaatatgtcgtcaagcgggccggaaggaagacgacgtgagtatccgccaggttgggttcgtgtcgctcgtcaagttattcacttacacttcatcctaatgtgagacatagccgggtgatcaatcagctcaagcggtcgcgagaggaagacccgttcgcccgtcccgaagcgggacccagccgacgccctcctagtccacgcccgcaatcgacacagactccaccagaactcccttcctcggctcaatttcaattcccttctggtctactcttaccacaagcttcgccaacgtaccaggacccgattcgctcggccaccttgccttactacgacactccctatggacacccggaaacgtcggccttgtccgtctcgacctcgtctcaaccagacgatcaggcggccttgtcaggcctgctcaatctacgcaatcatatctcgaaccacccggccccgtcgcaccaccattcgaacgtgccggcttatcattacgtcgtcccggaattaccaacctcgttgaatcaccaccgaccctcgcactcgagctcgcaagtgctgcagctcgaacaggtcatctcgtgggccaacgccgcgttcttcttgagactttacttgaaatatcaacatgcactcatgccgctcgtgcacaaaccgagttttgccaaggatatcgttgacaggcgggacaagactgatgaggtgtttcgagggttgttgttcagcctgagtgagtcgtgctcctgaaaacattggaaacatggctcacacctttgatgaccgtcacgcttgacccgcagtcacacacgtgatatctcaagtgccgaagagcaagatgatcacccactttacgcaacccgacctggaacgcttacaagtcaggtgccatcaagcgagcaggacgattcaagtcaaatatcatcatgagccgagtctagagttgataattgcacattacgcgtgagtccgggtccacaagcccagctcgcaaacagtcaagaggctcatgacaaaccacttggaattcgcgattgccagggatgtcgcagtgtgcacgactttgggaaagacggaattgtcggggatcattctcgccgaagccgtccgtatgagctattctctaggtctgcatcgaccgaaatcagtactcggaggagactttttgcaaacgcaaatgcaaaggagactgttttggatcctgtaccagaccgacaagtgagtgtccctgctgaaaagctggcccggtggggtttcggctaatcgaatacgatgacaatgtgaaataggactgaagcgtccgtagggctgccgtcgttaatgccggactacgaaggcgttccgccgatgccactcgaggtcgacgacgaatttatcacccctcaaggctacctgccgcaaccttccacccggccatcgaccatgacgggtctggcgatgtgctgtcgactatttcgcatcttttccgaatgtctctttcgacatcggaccttttcctacaccccaggggtagccgcggacccggagagcacgttgatctgggtcgaatcgtcaagacgagacttgatcgatacgttgagaagcatgccggatgcatggcggtcggatccacaaggaatgtcggacgaggacgaccgggtcatgtatgggacacagagggccaatattttgatcactgccgcttcgcttgattttgccttggtcagtcctgaggatcagggtctcgaaggtcgacgagctcattttgtcccgtcgcaatcaatagctcgatctcaaggcgctcatcttaccagaagtggacatcgcagaggaaagggaggcggcagcgagagaatcttacagcatgttgtcagcgtgagtaccaaccgtagtttcaagggttctgccattctggcctggacgggacctgataagcctggatctgcgttgtcgcaatggatagaattcctatcgagcacttggccatgaatggagaaagcatcgtgagtggatcgtgacctcttgaaccctcctttcggatctcttgaaagtgccccgtcaatctgaccaccccgccttcgctgtccattgccgatacagcgtggaaaagtcttgcggatcatcatcgctttgatgagcacaacttcgatgcaggacgagacgtacaatcagagcgtcaaggactggtggggaatcgtgagttctcgcatcacaagaaatattacttacttcccgggctgatttccgaccttttgctcaacagctttcccaagttcaatgggtccaggtcatccctttggacaccgagtccctcctttcgaccgagtcgcagtccatgtgatctacgatcttcgagagccgctgacagaacatcgctccacaagccgaaactttgatgatcacccaaattcaatttcgattttcgctcctttttcgtcacgcgggcggatacaaaccggcaagccggcttttcgccttttgatctccttttgttgaccgtgattccgtgtttcagacgcgtcggtcgttgccttcccacggttctgcctcctttggccgctcctttgccatcattttgatcgcttggttctcttttgttcctttgagggacgtggtcccgttctcaatcgttcgcttccgatgtcgtcgtgcctttgcaacaccgaatccacctgtggcctgtggcctgtggactcgagatgatatagatgcacgaatctttccacgttgttgttttcgatgttgctgaccagatacgggactctggaccgtcgtccctgtctattcggactgaagtcgtcaccaaaaaggaagaagactaccgccaatacgagtccatccaagctcggtttgttattcaggccttgtcatgtcgttcgccgatcaactccccttggagaaacgagtggacggcgctctgtaagctcgttatcttgtgatcgatgaggaaacacaagggcctatggccgagccacgaatcgtatctcacaggattggtcctttcgtgggggcctatatcgacctactgctgggaggagtctgcatgcatctggtaagcattcaagctgctctgcaccatcactacggggaaatgacaatccgaccggctgactgatgatgacaggtcgccaagtaccttcgaacaggaggtcgaccacccgtcgagcgcagagtggtctatgtagcatgcggcatcgcagtgtcagtctctctcggaggatgcgtctggtttccttcctgacaacccttatccctcttcttagcgtgaactcgatcgtccacatacaccagatcttggacgtggccctcatgaacttatataacgcggacagagtggtccgattcggagcaagtcaagagatagatacagtaacgatttactatctccttggactgatctctgcttctctcacttggctcggcacgtgacagtggaacttccaatgtacgttcttgcttaacggtctcgtcctggctctggtgcagtcagtttatgcttatcgggtgatcaaggtgagtcgaccgtctagggacaagaattggtcgagcctgactgaaatcactatcgacatgcggcaacccgggtagctggccggcgatcgtctctgcatgaagatcggtttgacctgcctaatagtagtcggtgtggcggcaaatgcggggtacgtcactggaccgcaaggactcggagtcacttagtgttattggctgaaatgaagcgacgatagacccacggcagtctcctttggggtccccaagccgcaggacgtagtcgatgtcaaagagcagatagaaacgtatcgtctcctcaacaaggtgagatatcctgtatgtacatatggaactgcagctcacggtccatatccgccctacagtacaaaccggtgatcatgatgatgtacgtcatgaacatgatcgtcgactttgtcgtctgcgcaatcaccatgatcaccttgaggagatccatgaacaaggccacgactcggtgagtatgatgaaccatgttccgtctcaaggcatcgcatgaagctaacagtaacgttccaggacggcgaaattccttcgacagtatgccatactttgcgtggaaggaatggctcttcccttcttggctagtatcgctgccatgattatgcacaacgcaggacctgcccaagtgagtctcgttacttcttgttctagctagcaatcgctaatacggctttcatgatcagtccagtattgacgttagcgctatttggcccatgcacaaactggctctcgtctcactcttctgcttactactcaagtgcgtgcgcaatatcaaaactgttctgctctcaatgtactgacggtctcgtggcgttgggggactatcagtcgagacacattcagggagaagctgcacggtgccgtcgatctgagctttgagctctgctcgcccatccctcagcacaccggtagcgttcgcgtcgagaatcaggtcgagacaagcgtctttcaagacgagtaccaaccaagatcgacggcgaaccgaccagtccgctattgacgaaagaacactttccgagctcgaagacggacatcttgtattgattgccattcgttctgcccgaaccattgtaataggccgtatctaccgggctcagggccgagaattttatgtataatgaataggtcattcatttggtgtggacgagtctatccaaccactcaagccacctcggcatatcacagcccaccctcaacatctctttcttcgcatcctctatttcgatattgaggtcttttcgggggacgtctgagcgaggcaagacctggaagacaatgtcgaagtcggattccgatgcaagagcgcgtaaaggcgtgaccttgataacgagcatttcaagggctcgattcgctccagacagctggggcaacggaaggctcagctgtaaacacccggcggttcgttgcaccgatactgagagtgcagatctcggaaggactccgcctgaaacaatgcaaggagccatgagtgcacaacttaaggaggggaaaaacaagctggactgaccagacatcagaagcgcgagatcggtatcgacatccttcgaagccccattcggcagggactggatattacgcatcgcaggtttgaagcacgaagcatacatcctgttgagccataaagaacgttgcaaggccttgcacaaaataaatggtgaacaagatccaacggaaacgaataagagcatcggatgcttacctgcttcaacgtgtctatcccgtgttcgtgcattgggttttggtgcaaagggaatctagataccctgtatcccggtgttccgtcaccgagactagtatactgctgggtccgacaatgaggcgtcgtaggtcgatgggtcgagctgatctcttcgctggacttcgattggggctgcaaatgaatgagggcaggttctgagccattatcgaaaacaggatactggcccccacaagccacaaaggacgtacaatgagcagttcagtgatgtctttgcctcccgacaaggcttgagcgtgggatgccaacgcgctcggttctgacgagaaagcatcttggcccacaaccagctccggctcaacttccagcatccatccgctagtatgaaactgtgtggtttcgttctcgtcccgatcgacgtccatctcttgtccgctgcctgcagccttcttcggaagcggcgttgtaatcgctgggccatgatttttcggcaacggttttaggcagcatgtcgcgttgggtgagagcccgtcttgtagtaattgaaagacagggaagacacttcgcaaggccttctgaggtgcatcgattgtggtttccggtattgtaccgctgtggtccgcaaagacgagtcagcgatttaaggaggggaaaatcttgccccgagtccgactcactcaaccatgtgccccatctcttccgcttccacgaaccagttccgctccgcattcatctcttccgtcgtcaaaggccgcggcgttacgggctctgcggacgttgcctcgaattcaacctttttcatccgcttgtccagcaacgcgatctgagcaacgttctctccgaatgccacgatagtacgctctgcttgcaaagcaagagaatcgttatcctcctcgaacgacatcgagagaaccgagtcgtcgtcatcatccgacccgtctaatgccaattgctcgagctggtgggtattgacgatgccgatgtaccgagcgaggtatgctgacaagacttcgctcatcctcggcaaaacgataggttccgccacctcgctcccgagaggaaagtacgacacttcgcatttggcgacttgccatccgtcttccaattggtaccgcctcctccccgtcgacgcggcctcccattttggatgccgaatatccatatcgatggccatcctctcgcccccgaaactgagcgtgtcgatgcggacgtttcccggttgatcggtggcgttgcccagatcgggatcctcgttgttcagatagacgtcaagtgggatggaaacggccactgcttgtagtcgttctgtcgggctgaccagcgtttgagcgtgaacgaagggggtcctcgagcggaaagcggcttgcgtctcaagcttggagattgcagacgaggtggacaagagttgagattcgtgattgcacctagacatttctggacggaggttattgaacgcttcaacgattgacccaccggaacccgttcgagcgggaccacagggtggactcaccaatccatcatggcccgtgcaactcccgctttccgcctctccagctctgaatcaagatctctcgacgtttgacctgtagcatccggcttggcgaattgactatcgacgacacttttctcggccatccaagacaaccggaaatgttctagcgacgatttgagcattctgacctctgccaatgccctttctcgctgacgaatgacattgctggaatgacaggtgtaagggtgcaatgtgtcggaagacgaagaagggaaagccgattcaagcgagccgagcacgttgtgcagcgaggagagtaccgaccgaggtgtcggttctgtgtgcccctgcatcgtgcagccctgtagatgtcgatcgctagatggacggggaaacgcagtctcattgtcagtatgctactctgatcaacctgaacccgtcttcgcaagcttctgccaccgcgtctgccatctttttgccctcccaactcgccctcagactcgccttcaaattcctcatcaggcctctcgccggtatgaagcgctcgacggtccgttaacatcgcgaggatgcgctggaccccggagcgtgacacgtccggaccagtcgtcactggatctcgcaatcgaattacgagacgggtgtccttgtcccgatgtgctggggtttaaagccgcacaccgactgatagagaggtttaccagtttcttccatcattggggagttggttcgctgcgacgcgaatggatggaggaaggcacgtccgaagccgctcgagacttacaggtatacggcgactgccctctttcagacgttccagcggttataggttggtcgagagatacgaagatgattttacgacctggtttgacttttcaagctaggtcatagccaaactgatatgcgacacggcaggtatgacgataagatgattatttgtcgagagctcaccaccgagtggacgtaggtcaatgatcgtcttttcctcgaatcgaatattcgttttttctggaaaatgacgcgttcggagttgaccctgggttcgtatgatcgccccgcccgtacagagcataaacttcgatagcgaaagtagtgtagtacgagtgaaattatccgttcggaaagggataccggaaggtcgccacttcatcattgatagtatcctatcttgtctgctccgacaatggccgcacctccccctaacaatgcccccgcggcagctggagggcagaacggtcaggatacgtgagtcgggtctgctcgtgtcattgcatgtgaatgctcaatccgacgttgtcgtgatgcttggttcaggacgatgaagaaggctctcaaatatatcatgatcttcatggcatctcagagtcgtaagttcacccgtgttacccaaagagctgaaacccgaaggacatgcgctgacgctcggttcgttcgatcacagtgatctcgatcttgtcacaacaggcaagcttgcacctagcagcaggatcactcgaagccttcacacttacactccggaatttcgctttcgtcacttagttcggaaagacggcctccaaattcgttccccctgctcaggatgccgatagtcaagcagctcgagcagctgtcccgactggtcctgtcacgccagaaacacgttaccctcccatatggccgagcggtaccatcatctccatgctcgtctatgcatcggaggacgaacagccaaacatcaatttcgaggctcagttgcctttggtcgtgttcaacaatatcacgtatggagattggaagactcatcgcgaagccgaggtcacggtagacctgccgatttcggtgcagaacaatggctcgttctacggccacgtttacctggtcgacgaggcgttcgtagagggtagcgaattggcgaaaccgagatttacaccggaacacatcgttcatcacacgaaacagctggcgaggtattacgagccggccaaggtcaagaaggccaaaaagctgatcggcgcaaagggatcagaagcagcggaagaatcacttgaaaccgctggacctcgaccgatcctctctcattgggcgaccaacctcactctgacaattgtcagcgacatcggacccgctcagaataacccaatcctggaaccctacttgaccctcgagaataaccgatactaccctatcatatacccaaacgatttttggttgctcaaggaccatcagtttcccatcaactcgaccactcccaaagtacccctcaaaatcacgtacgaccccatcagcttcatgaagtttaacctctacgcatcgatgacgagcaactgggaaaaggaacaggccaacccgaacccgaacccgctcgcggggcctgggatcgacccggacgagatcaaaaagttgttgctctcggcaaacccctattgggcggcagcgactgccatcctctccgtcttgcacatgttgtaagctggattcgcgaatcggacagctctgtccatgtttgctaacgatatcgctcggcgctggttcgtagattcgagtttttggctttcaaatccgatgtgggccattggcgcaagacggacaagaacttggtcggtgtctcgttgaggtcgatcatcaccaacgtcgttacgcaggtgagcgctacctgcccttttctcgagccttttgacggatggaagctaaagacatcggctgatcgttcgattcgatcatcaggtcattatcctattgtacttgcttgacagtggagaacagacatcaaagatgatccttttgacgaatggaatgtgagtctcatccacccgatcccacctgacacgcagtcactactgtcgtctcgacgctaattcgaagctttcaacctacccgatattaggggaatatttgtcgaagtctggaagattaccaaagtgatcaatttcaaatatcatcctcctggaccgggacagactttgcctagctttacattcgaggacaagaaggagctcagtgaagacgagaagaggaccagggagtacgatgctttggccttcaggatcgtcggcgctgttgctgttcctactttgatggcttatgccgcttattcacgtgagtcgacgtcgccgtgattcgcagggtgctcgtgagcttatgtacgtcgttcgacccttgcgccttattgtccaatcatggcagtgcaaaatcagtgagttttgcaaagcttccgctcactgtctggtgcgaacgaggctgatccgaacgtggctcatgtccagtgtttataagggatggtactcgttcgctgtcaccaccctcgccgaggctgtatacatgtaagttgctacgagatcccgcccccataggagaactcagttgatcattcttcttcttctcaacaggtttggtttcgcccaactcgtcccccagctgatcatcaactacaaactcaagtcggtggctcatttgccgtaagtggactggattagtgtacaagtctgataaagcgattgacgctgatctatcgctcatgaacaatcaggatgaaggcgttcttttacaagactctcactacggtcattgacgactttggttccatgatcatccccatgccttggtgtgagtgcttgttcccgagtcaccatgcacgacttagcttacagaatcgcgctcgcagtgcatcgactggcttgcttccgagatgatgccgtcttcagtaagccgtattgatgtgctcgctattcaaatctgagtcatgctgacgtctcgttcccggtcctcccagttatcctcctttaccagcgttggatctaccgagtcgactacagtcgagcaaacgaatacggtcaagtgatggacgtgcccgatatggacccccatgagggaacggccggcaaggttgttgcggacgcgccaggcgtccagaagaacgaagtcaaatccgcacaagttcacaaggagaagaagggcaagaaagcacactagacacccaggaccatcttgtatcagtaacgatctgcatctatacatgcaaagcctagggagagttgccgcctctgtgaagtgcacattggtatgacccaagtgttttcccacgtgccttacctgcctcgcattgtcagtgcagtcagtcccatgtacagtttcgacgggccacacatgggcgatatcggttcgtcccgtaatcctaggcgatgttgacatcatgatttgttgacgaagtcagttttttcgcttgtttccacccaaaacagagcgatcgtcgacaacaacaaatatcatggtactaccactgcatagccctcgaggtttggatcatgattacgaaacatacacgacaactctatagctatcgaatcagaagcaagtgatcgattgatacatcatcgtcatgtacctcagctaaaaacgacagactcaatagtcccgaccccgattccgccatgcgttgcgactacctcgccattccgacgacgacggctgacatgtccctactccggtcgacaacgctgaggtgaccaccagtccgcccatgtctcgatggatcgtatcttcgtgagttctcgactacgttgtttgactcttcgagagacgctgaagagcgggcaaagctgaccggaaaactgttttgcgctgcagatgaggggactgtgtacattcggtcaatcgcatcatcgaagcggtcaggtcttcccattctcaacggccggaggacgatcagagggtacgttgatgaggccggagctgtaaccagacattcgcattagatggtgagtgcagtataggcggctgtggccgactggctgcgaacctcgaggctgagatgagtcgcgtattgcgttacctccatctgcctgccgatcggcgactcggacctattctcgatgacacccagaagacgatgaagactcagaatccgacagatacctctgagacacggtcaagatcctctcgttcccttgtcggtggaagtggaagacaccacacgatgcagtaggcagcaggcttcctcccaagtaggtctacggcggacgtggggctacgtcatgggtcagtggttggtccgggacgagttgtgtccacaccaggatccataatgatcgctgacatttggcgggggatggcggtactcgtaggccgcgattcattagattgctgttttaggattccctcggccaatgcgatcgcacgttggcagagaccgggagaccttggtggggctatgcgctctttttcgacgaggatcaggaaactttgtgtgaaatgtcggcggctgctatccggcgtacttagcaaggacggattacaactgtgggtttcgttctgctggtgagttcggccccttcctcgagtccttcccaagtgtctcggtgaccagggctcattaaccataaccagggactgatcaggtcggacgcgcacaccaaactagaaggagtggttgcaacaagacggatgtgccgacgtccaccccatccacctgagtcgtgtcacttacaggtcgcctgcggaaacaaccgattaggaaattattaattcggccgtctcgcctcgacgcgatacctcagtaggggcttgatcgagacttccatcccacgatgtttttgtgtcgactccgtcaggatagcctgcctctcgctgtgaccatgacacccttgtcaaatcgtcggcgccgcttcatcatgagcgagccggaaatgcaaatttgccttatgatgatctaccatccgaccgaccagactgatgctggactcgcaattcgaatgcttagtgttcgaaggtctcctgtttgttatccattcgagcctggcccgacgatatcatcggttgtgacggaggccgaactgccatccatttccattcgtatgttctatccgatgcagacgatcgtgcactatcaggctgactgcaaccccatttgtatagatagctcggtcaagaacgatgcaagagatcgtagtatccgctcggagtctaagcaggtccatcactttccgcacttatgcgagagggctgcaataatcgcctcattggcttcagtttcgtcaatcgtgtcaacatggtcttcgtgatttccaaacagttcaacacggaaggctacgtccgtggtgcccacaaccctaacaatcggtttgactaagactgcactggagacccggccgaacagcaatactccgccgtttggaatccattcgaaagcggttacaaatgtgttagtaacgagtcaagcatatctctctcagaaaaaacttgcgctcactcttgcatggctttctttatagtctaggctatagacgaatgtcattgtttacaactattttcaatagcattcaactgtattgataagttgcagttgttctgtatcgcacgcaaaaatatctcaaaaaatcgatttttatgggacaagcggatttgggtcgcgtcggacgtcaactaagcaaccctaaggagataagaagttgcgtgcgtgcctccgcccgtcaatgaaccatctacctagttattaatcgggaattatagtcgcttattagcggtgacgcctaatattactactatcgcattcaggtttggaaacagactactactataggcgtcttggtggttttcgttgctgttgacctgttcacccaagtagccttattagggtttgtatcaagcgaatcgaagcataccaataagtgaatgttagtgtgcggctgagacgttttgtaatatggtttgggtcgggcttacaatcgagataaacaaatgattcggatgggccgattggctcttttgctggcaggtgtctcctcgtgagatcgattgatattcattaagatgtgggctaatcgggtaacggcgcgacgaagtatggtctatcgtagtattgacggatgtcaggtcattccaaatttggggtcgtagttgacattactagtctggtgcgtaatcatctgtttctaaacaatgatctgtatcgctgggttgctaccatttcagaggaggggatttggcaatcttgatgtgtcgatatgaacgtacgttgctttttatcagtaaacgagggctcaacaataatcaaaagtaataagatagtctaatatataattgaaggctgggctccgctactgtcatgtagaggccaggtgaataccaacgtaccgttgggacgatcctgacatgacagcggcggagtcttggtctaatctgatgctacagtcttatgacaggagcgttagatggcaagggctcagagtatgtttgccagtgatgtggtgagcaccctgctgccgcttgccttgcataagaatggctagggccggttgcataactgataatgcaagggtttttttgcccagggccagattgctcctgactttgaggtttagaccgtcgtgagacaggttagttttaccctactgatggagtgttaccgtaacagtaattgagggtagtacgagaggaactgctcattcagttaattggtatttgcgcctgtccgatcgggcgctgagggggagatcacacggggccagcaccctccctcccccacgtcttggctcggaccaatgacgtacaaggcagaaagacagtcgagtcgctgatcgtctttcacgtggagcgagacaagacttcatcccacctcctcaataccgcaatcgtatccaccaacacgatggacacccggatgaaacgcaatctcgaccggtcgatcaaacccctgatggcgaaacgcgacccttttccccaggagtttttggtctactttacccccactcctccttcccgggatggcgggttcgcttgcgcctcgcccttgccgcttgggccccacattcgtctagtcggaccaatcccagaccagccatcccgctcggttcggcccggctcggagcgcagaggcgccgacgagatcgtctcacgtgaccacaagcatcatttacattcgtccccgtgcctgtcacacatgcacatcagacttcccgccggctatcgatccagtttcggaccgcaaaatgtccacagagtgccggcattgtcgctgcaaacgagctctttcaggaccttcatctcctgattcgccaaggtctcgaccgaatgcggacccccggaccaacgatctccagccgcccatctccgtggggatagagtctggcgaccagcggtgcgaccggatcatgcttgcgatgctcggtagctcgattcatattgtgctagactagtagtaatacagtattgacgcagccgggcttgatgcatggccaccgatgaaacgatcgccctccctgccaacggttcgatccgggatccttaatcactcgctcgtggccatccaactcgaccccatcattcttcgctcaacctcgtcggggtggtcttgacctccccattgcccttggcatgttcgacccagtactcttcgtccctgttcttcctatccgtgtatccagcaggaacccacttggccgagtgccagggcttgagtcccttttcgctatacatggtgtcgacggcttcgagcgagagacccttggattcaaagcagaagaaccagatcaagagggccgccgccaagttggtaccaaagctacgacatggggatcagacgcgcaagtgtcagtatcggcgctggttaatcaagccaatgtcttgaatcccgtcgacgcttacaggacgaagccaaaggcgaaaccgataccgctatccgcaaagggggtcaggaacgcgatcatgactgtgcgagatcgtataacgacgctcgtcagtaagttattcatgctttcgagggtcgtacaatcgcggactcacagttacccagccagttaaaggcggtcgcaagagaagcctgtttcgctctggtcctcaaggggaagatctcgccgactagaaacacatgcacaagacaccaaagtcagacgatgtacggtttgctggcagtaccacgtcagatacttactgactacccatgcgccaggaccccaggtagaggcgaaactagcgatgaacatgcaggccgctacgatcatgacgatcccggaagactcgtattccgtaggaggtcgagcgacaccgatagacgcaaagatcaaaagccagatggcctgccagagcgcgccgtagaacaagggggtccttcgtccgactttttccaaccaccagagtcctggaatagtacagaccacgttgacctgatagagatggatcaagttgtcagacccggttgtcgtcagtcgaaacgacgtcgtggaataacaggcacgagagatactcacggctccgagaatgagctggacgagaattgggtcctccgttccagcggcctgaaaaatggtcgctccgctgatcacaacggtcagctcgtgtctcgcgttatggaatcgacgcctctcgcagctcactagtagaaaaagtagtttacacccgtccattgctgcaaaaactgaatggcgcaaccgaggaatgtgcggtacaccaaacggggaatgtgcgaaggtgccccggtgatgcactccaaccagcttccttgaccgacggccttctgcgcctcgatggactctctcatttcctgcatgtcatgcaagacgtagacgtcctggagattatccttggagcctcgaagacgcgccgcagccaagtgggcaccctcccagtctcctcggccagcgagccaccgcgggcttttacacggacaagagatgcatgtcagcctctctcaatctacaaaaccatcatgtcttgcggacgtacctttcgggagcaaacaggataccgattccgaggggcaaggagaaaaagataccaagaccgatgacgatccgccaggaagccgaagtatcctcgatggtcctcgtaccgtagttgatcaggttggcaacgagaataccaatggtaataagccattgataagaggcgaccagagttcctcgcacctccttgggctgagtatcgtgaagcaaatgtagttagcagccgcctggacatcgacaacagcgtttctttcgcgcttaccgaggtttcggacatgtacaacgggaccgcgatggacagggagccgactccgagaccggcgaccatccttccgatcgtaatatgaacccagctgttcatggcggtgatttgaattatgttaccgatgatgaaccagccgacagcaaaggtaagggtcttctttcgaccccaccagtcgaggatgtaagagcccaacaatgcgccgaccaaggttcctacggggcggaaagtgctttagcgcgagcgcgatctgcacccggcacctcggctcgactcgactaaccgatactcataagcgatacgagcaagctactaacaatcgattggaattccttctgtccgttggcattggtctgtccaaaccgatcgatgaagtcctcaaaaagaaggatttgagagatctgaccggtatcatatcctgcgaatcacggcggctctttgtgagacggactgcataaacggcgctatcgagcggcgagtacctaccgaacaagaagcctatcgaccgttgtacaaaagagaaactcattacctcgccatccgttgtagcatgccatcgaaacggtaggaacttaccaccgatgttggtcaggatacctagaatcagagcttcgattccgaccttcgtgccccggatcataaaatgactggaaacatatatatatacggttagctagtcaaaataccagcttcaccggcctcgatgacgtaccggtttccgagacccatcttgaattaggttgacgatttcgttcgagcgtttcaatctggagtgcgaacggaggagagatttttgaggtcctaacaacgcctggccgcccagtgatctccggacttccaatgattatatatgatttccgccattcggctgtacctgcaggctctctcatgaaaacaatggaccaaggttcctccacatgcggggagacctcgaatcccctcctccagagcggagatgcaaaggggccaagaccaccctcgaacggttgccaactcgcggtaaggcccgaatttagtggggcagcgggaaaagagttcgagtggaaaccgtcatcggctaagcgagccagtgccgcacgccatattgcttcgagatggggcgggggagcaagcctacgccctgaccgcaggcctctgccgcgcgtgtgatgtgccaagcgtacaagactcgaaaccccagatcagctggcctcgcttgctgggatacgacgacagtgggcgctgatcgtagacttctcggacgccagagttggagagcttggcagaataagaagctgatcgggcatttcaacggttggctcgttgcgataaactggccgagacaccaaggcgatatcgctgctccgaatattccttatagcgttgatgacgtagtggcggcggaggtttcagctgcagcagttcacttggcggggcgacgcgagctggttggtgactggaggcaaggccgtttcatgtcagaggtgagattggatgttgatcgcacggaggtggcagattgcggatccaaacgtcatgaggtgttactctgccaccttcggttcggctgcttcctgtttcaagccggcaaatcgtttttcaaaaccaagagggctctgcacactcggacaaaactctgtgcccttgggacccgcacaatttcggcatgcggttcaaatagatggggaagggtctcctgaaggctggagttatgaaccagtatagcctttcttttcaagtctgagtactagtggaacggagagtggcgcagccaaatcccgaagattgtcaaccatcaaacacaaccaaaaggagcgactgccgattcttccgccggtaaaggattgatgaaccgagtgttagtatcgtctctatcgagccggttaacgcatcacattgaagagcgtaagaaggttcgtcggcatcttgatggccagaacagccatatcggtaatcacagccatgtgcaacctctcgatagcttcgtgagaccatgagctgtgcctcgaacaactcgcttcatcgacaatcgctcaaaaggcagctagacaaaccggctacggccaagagatcaactgtgcgcaagcaaggtgagtgtatgattcagttgcagctggtagggagaaccttggtcacctggaatgatattgcagttggctcactgacggcaacgtacccgggcaaccctgtgagcgtactagagatgcaaaagcattggctgaccgcgatgtacagggcgatccgatcaacccagacgaagtgattcagggctttgcagccgttttgcatgtagtttaccgtcttctcttgatggcaaatgtcgaacttgctcggagaaaacaaagaggaaatgtattgaacgtgactgcctacgcctgtcggtaccttcataaaatctgcaacctgtgcaagcggatgctgaggggaaacgatcacgatcacgatctatcgaatggtaaggtcggtatagccccaacacgcaaatcctgagcaaaagacagaaccgacaggctacgatccagtcgtcagagcttgggccgagagaaggccttttccgagacgttgaggcttccggtcagagtctcttcgatgatcacattttcatcacgctgagccgattgtctcatggctttggctatacactgctctacagtcaccatgtcgatatgacccggaccgccgtgtcctggccctcccctttcgaaattggcgtatcggagacgagaagaacgaagctagcatccgaccgacaccgacagcatgaaaacacgaatacgatagcagagcatgaagacacgaacacgatggcagagcacgatggcagagaggtatgtattcgatagtgaatgtatattgagccggtcgctagtatactacatgtgaccaggcgtcaggtcgggatgggggtgggtggatgggtggctaattacagccgtcgtactttgatcgtcgttataatggcaaggggagaaatcgatataaagccaattcgcaaacgacatcgggtgcgccgagggatgtctattcctccctcgtccgatctgtcgtcgcgtctaccgtaaaaaaaaacacacacattgggaaaccaggaggccaagcgagtcgacctaggcggcggcggcgaccaggggtgccacgtcgccaatcttgtctgcccgcgagacgtcctccaagctcgtcatcgaggtcatcgacccgtgcccgccacccgtctttcgtagacgaggggcgctcttgacgatcttgaactcttcgctgggggggatcgccaacgtgtacttgtccggaacgtaacatccgggctggaacttgggcttctccttcttgggcaactcgttcaagaattcgacctcgctcaactctccgtccgacagacgaccggaagagtacgaggcgagcgatgcgacgtcctcgttcgaggagaacgccgagttggccgaagatcccgaaagcgatcgttccctgaccttctgcttcaaatgctcgacttccataccgccctcgaggcatcctactcgcatcatggccagcaagttttgcgcagcgtgactgtggtcgtagacacctccgtagaaggcggtggtagcgtccttgccgataaactttttgagagcgtgctgaccaccggggtggtcatccatgaacgacgagacgtcgtggatgaatccgtgaacggcgatcagagctcggctcttggactcgtcgacaaagtcgtcccaagagacgacgggcaagtggttcgagtcggtgggccactcgatgacttcgccagcctgggcgagcttttgcagttgcatggtatagattcccttcttgatctcgttgtcggggaactttttcaagtgcgaagcgagaccgagcaattgcatcgtggcgatgaaccacttggtggggtcgtactggttccacttgatggcgttacggtagtccatagggaattggtctgagtaaggcagggcagaaagagtcaggtcgtgcctcggcggcgagtgcgttgcgcgaaaactcacggtggaagttgtggtatccctcgccgatggtgaccaaggcggtgataaagtgatcacgaggagtgtgcttgtcgtcgaaagtgtgttctccgagccaatgagccaacgagttgacacagaaggtggactggggagggataggcaagggtcatcagctaagagtgataccggcggagaacgcaaccgggactcacgtggtgaacaaacaacaacctggcggcacccgcaaagaagaaacctcccttccagtcaccccaaccgagaccggcgacacccatggggaagaacaatcccatgaccaacaacaacgacaagtagttgttgtgctgccacctgacgaccttgcttcgggtcaagtcggaaatgtcggcgacaccgatcttggttctaggcttgaagatcatccaaccgacgtgtgcccaccagaacccttcgtgggccgagtaagggtcgaggctggtgtcggtgtaacggtgatgggctcggtgaccacgggaccaccacttgatggatccctggacggctccggctccggcgcaggcgaggatgtactcgagaggtcgcgaggcggtgtatgatcggtgggcccagagtcgctgcgagggcgggcgtaatggtgtgaatatacggcggttcggactaaccatggcgacgctgacgacttacgtggtatccggcagtgattccgagaccggtaacaaagtagtacaataccgaccaaacggcagtgtacgtgttccacttgacgttgaacaggccgtagatggtcaaagcgggagtaatggtcaaggccaagaaggacacccatctgattgagaacggcgagttacgcgatgagtgtgggctacaaggaaagaggcgagtgacgtaaccaactcactggatgttcttgtgccagttggccatggtgactgggggcagtcgcttctgggtctcgagtgtcctcgtgacatagttgtccggaacgtcgagatccgtggggatgtccgtgggctcgaggggtttgacgccgagcttggtctcgctcttctcctcttcaggaataggaacggggttgataggcgcctttcggtgcatagctgcgaaagcagtgtcggccatcttgatagaggcgagttgtgggttgcgatgtgaaaggttttgggaagggggagccggtggaagttgatgggtagtaatgtgatgagagttggggaaaagttggtggtcgtgaaaaggatataggaagaggggggatacggggaaaagacgatcaagtagtttccttggagagagaaaggaggtaggacgtaatagttcgccactatttcgagtcgatgaggttgcaactgagtttataagaagatagaaaggagagcgatgagattgtggggaaagtcgcagaattgccagagtaggtgagagtggagccaaggggaatcgggtgagatcgccgggatggatgggatcatggaaaagccccagccaaggcaagaggagcagagcagacccacccttccacccttccccaaagttcggatagatctcgcgtggcggatgcatcaagggcggctggccgagggagagctatatcgatgccgtgatcgatcgtgaatgccggcaatcaaacaacctccgtcacgcgcgtcacgtgaatcgtcgttgatctccccccaagctcgcagctaccggttatatcaccgcaaaacgcgtcatcatcgggaacatacggccgatcggtcgttttcgggtcatacatgatacagccagtggtggtgatactccccaaaccccccacccagactcgtaacggtgggtgattgcgggacgacaggaagcgaacacgtagcacgtagaattatgcgtaatgacattcgttgacggtaggcgacatgacagtcttggttcggtaccggtcttgatgcatcacgtaaatggcggttctcgttatcttaaggtggtaacaggtcgtgcgagcacagatttgacgcgcaggtttagccgagcctagggaatacgaaccctcttgggagggctgacctccgaatcgtccttgccaaagtagtcgttgatacgtttcctagggaattttgatagcgaatcaacaaatcttgttctgcccgatcccatccgcgaacttactgttgatgattgtggagtttgctgggagtgccactggatttcgaagccgtcttcttcgccagcgtcttggacgacgacgaagctggactttgtcgttttggaatcgggcagatgggcttgagcaaagtggacgcagcggcggatgctccaggcgaaaaccttttcccgctggagccttcaggaaagccattcatgtggtcgatggtatccgttgtcaggaaaggatcgtccgcttcaaccaacatcctataaaaagcaggtcctcgcatcagttaggtaaagggtggagaaggacggcacatacggtgatctgaacttcgggatgttcaggacacttggccgaggttcagattgtaaagatcgcatagccatggggatcggcttgacgacgaccgcagcgggaccgccggtggtagagctgctggtcgcaggtagcagtccgatcaccgactggtctgactcggcaccggtcgaactgagtgtcgtggtatcggcatcatgtcagacaccaaaccgatagtaactagtcaaggtagcacgaaccgaatgaagtcgccgatagtattgtccagaggatgcggccctgcagcggactcgccgttttcctgcgaccccgaagacaagatgaatgagcacacagacatctatcttggaaagcccgaacataccttgagatgataaagagcgaccggaatcttgctgtccctgagaaacgagtcgaatgctggagtgctgataacgtgttgccaaacaccaccattgcgcgcgtgggttcggaaaccactgccagacaggagttcgatttgatatcggtgcttgtattctgccgaaagcatagtatcgtcaagcacttggattaagagagcggtccccgtgccagcttggtatgtgaggtggattcggatcgggattctccgactgatcctgtcggggaaccatgactgagagaccagaccgatttttcgagtcgcatatccatccttaatcggaagagaaacttgaacggattgttcggtcatgtagcgatcgaaaggaaacccagagattgggccagggaagtccttccagatccccgtctcccgagcacttggatcacaccatgcgcgaaactttctgatgaaaaagggcatcaatttaaagtcgcctcagcgggcacataggacctaccctgtcgctgttgtattgtgaaacaactttgaaattggcttgccgcaggagttcaagctcagtggagatattcgagttgacgattgtcgatttcaggagatgcgttgccaatgcgcttgcgtattcggccgaaagagccctcttgcacgaaagaaatccattgcggtagatgaccgacgggtgcacagcggccgtccacctttacaactcggattggctttcgttcaaagtcatgaccgacatcctcgcgatatccgtcccacatactgaagcacctccaaccctcccaacaagctcgacactactctccgtgtaacggccatcgcccaaagactccctatgccgaccgaccactcgcgaatcaaaacagatcgcgccccagcgactttgcctcctaacctccaggagctccaaacagaaatcgagatattgcgaggcggacaagggggttttgtaggttgtctccggttcgagatcctccctgtcctgatctactggagcgtttgctgtgtccggctcagcattgatgtcgtcactgccctcgccaagcgtggtgatgatagcctctccgtagcgttgtttggggacgtgcactgtctgcctgtcgtgacgagtcttgatggcatcgacccacgggactcccgaatccttccgccaacaatccgagattgcgccttgactgaagcaggaaagtaaggctacctgagctgcttcgacatgtctctctcttgagccaggttgttgcaacccaggttgacttcccaccagtaccatgcgatcgaggataccgatgtccgtattggccataaggttgactgtgaccgttgagcagcgccaacgcgctggacaaccagggatcaccgggctattggtgtgcaaggggatgatagtgtaggcaatgtactcgacaatgcttggcaacaagggggatggggggatgtatgcatcatccactgatggcacgatgagagttcggtaaaagctgaatttcccgtcattggataccctcctggccgtttgcgttgccttgtcaaattcgaccgagccggatacgaatccatattcggcgaggcgttgtcccaggacccttagattggagcgtgactggttcctggtcctttcgatgaccacgacggtagcatagccgccatatgcatacgccacacgggactcgtgctgaggggtactgatctccacgatccaggctgaatacgccccagcaccgtcccgtcgctgtcgatcgcaagagggaaaccaagcagcttgcgcaacctgactccgatcttttgggggctgagatcgagcagctggctctacgtcgtcgtattgcttacatgagcatcagagcagatgaaacataggtaatgatggcgagatctcgcacttcttcgcaaatgtctctgcaccgctgtgaccgctccatgcaacgcccccccgccgcgacagcacgaccgtcgccccgctcgctctcacgtcagtttcacatcgggcaagcgcgacgtgacagtcccgcggctgattgacactgaccccagcagactgcatattgttgtgtcagcaatacatctcatggggtcagaactgtccaagatcctccgaccagagctagtggaagcattagaatacaatgatcgcgttcgaccccgctcagcgtcatcgaatctttcgcatctgtaagaagtacacgatcaatgagatgatgacatgcgagccatgcaatgtgattgattcagtggcagaaatgcgtcccccgaaggcaacgatatccgaatgcttattgcacctaggggacactgggaagacttgttcgacggactgcacagaagaaagtcccgcaggcgacttcttgcgcaaggaggctttctcaaggtgaagatcacgttgtcccactcattgaatgggtgttacgcgataggcgacgcgtattaatcagaaaacacccgatcaaagaggaaacttcccgacgcgttttgatcatatcgcgcgacattggatgcgattatactacgatttattgggatacagcggttcgattccatgacccatttatccggcaacgatggcacctccgttgacgtggatggtttgtccagagatgaatgatccgtcagcggaggccaggaagacgtaactgtgagacaaggaaacatgggtcagcccataaacgcgagacagcgacgattgcgagagggtagttacgcaggtccctgcgagacgaagacaaacagatcagctcgtggataccattcagagaggacagaaaggggatattttcgagctcgctgggttggcctatgcgacctatgggcgcggggttctctagccacttggaaagagttcccttggacatggctgcctcttgcaagggggtgtagacctgcgacgataaaagaggcatacaaaagacgcgcttagtgtgcaatcgccttttttaacattaagcggccgacgtacgggtccgggagcgacggcgttgactcggattcccttgccgatgagctggttggacaatccgcggaccattccaacctgggcggccttggtcatggtgtagtcgatcaacgaggggggaccggcgtaggcgacctgcgaggcggtgacgatgatcgaggatcccttgcccatgtgaggaacggcggcacgggtcaagaaaaaggttcccttgatgttgaggtcgatggtgtggtgctggatacaaggcggatgttagtctgacggtcggtgtcgatcccgacgacgtggaggtactcacgaactgctcgtcggaaatgtccgtaatgttgggacagtcgtacatgaccgaggcgttgttgacgaggacgtcaatcttgccccaagccttcacgacggtgtcgacaactcgcttgcatccctccatatcacgcaagtcctgggggatcaagagacactcgcggcccaaagcttggatggtcttttgaaccttgttggcatcgacctgctcctcgggaaggtagttgatggcaacgtcggcaccctccatggcgaacatgacggcggcagctcgaccgatacccgagtctcctccagtgacgagacacttgcggtcaatcatcttgccggcagccttgtacgtgtcgaacccgtcctcggcttcaacgtcagtcgtcttgacgtccttggccatatcggcctggataccgacctcgcggccctcatcacgctgagagtggtccgcacccttgaacccttcggggcccgggtgagcaccggcggtaccggtggtagaagacgagttcgtcacgtcggatacgacttgcttgatggtgtccatagtgagaaatgtggggtttgtttatgaagagaatcgaaggggtcggggaggaattggggtgggaaagtgcttcgatcgacgtgatttatataggttttgctggattcaatacctcgccgccccgccagtaatgactggtcgacattcccgaacctcgatgcgaggcagggctcgcatcggaccattccgatgacgacgatggtggagggcgaccgacccgagagaaccgcgcagtctccgggaccctgcttgttggagccggtatcggtaagccggtatcgtcaccatcgcgcgcgtgcgtgtgcctggttgagccattgccgcaacggattcgggagcatatctccctcggcgatcgtgtgggcgagaatcgacggggtggaggtcgacgtcggcctggacgctgtgatcgggtggagcgcggtgtattattatcgcatcaccgctttacccattggaggagtaccactgcatagatataggttgctggctgatgtctgttgggcaaagtcgctcggcggcggcgtcgtcggactcacgtgaagatcgtgcgcagctgtcttgtatcggtcgcgtttcacatgcggtttggctagtgtatggtctttcaattgtgacagatgtcgagcgagatacgcgattggtaccttgcggcttttgcatgggtatcttcttacaattcctggggtatgacaccctccgataggttgctctccgtcagagttgttggcgattccccaaggtcgagccccaatagattctacttcgggttgtctagggcaaatcgttcagaatccaggtgcacatccgatagagtgacatttggcaagcagctccaagtaagggggcgctcgacatcagactagagcgcgtatcgtttgacaagagctgagacattgctgtcccgtttgtgtcgagattacagaccctcgcaccggtgccattgggccggcgagtcgttgtggcagcggggatctgacacctgggctttctatccgagcggggggtaggaaagtcttatgcgcaataaagaaatatccatgacatggaatggtctacagcccgcgtccgacaccatgaaagtttaaaccgattccacggacagttttgacagggtgtccgcttctttgcttcctcacagagcactcgaacgacaggggtgcctctccgctgtgccgagtatgcctctacagtctcattgcgaagcgacgtcctgggcactcgcgcagtctctggtttacaggtcaaggtcgggatcgatggtcaacgctgccccgatcgggtcgtgcagcttcagcgcacgttcgttggatcgagacattgggcaacacagcgacgcaacagcggacaagacctgaatagagtcctcaggcggagcgagataacgggtcaagatttgaccaagatttctggtggcttgcaacaggttcgaccggcgatggggccggtcagcgcgtccgcccgagcgcttcgagtcgcaatgcttgggatgatgccagtgactttacaacagcaaagccagggctgtatcgcttcatgcggaaatatgggctttgacgaattgttgcaacccgaacgatgggtgaagaggttcaagtcgcgagctcgtcgggtctcaacaggcggcaacgtcgtgaaatctccgctagtgcccgggggtgtgatcttactgaggggcacgtcatactgctcctcgatcgttggcatgtccaattatgactgagtcgcaaaggacatgaacgtacatggtcaatccgaacgaagggggacataaagagcaacatctcgagagagactcatgtgacgatccaagcggggccagagtaggggctaacgggatggcccgtcagaggcttaacataacccaagaccggggtacaggaagaccagcatcatcttcaagcccggtgcatggtccgaacccgttggcaacctttgctccaaaggatgcgaaaggtgcctcgactccaacgatgtcggattatgtctttggcgggccggcccgtctcccgtctgctcgctctggcccttctcgcggacaacccgactgttcacctgccgatagtattgtctctcggccgccggaccagatcattcgaaacagcattccagagcttgttggttataaatttgggcaatgttgattggaataccactggggttataggacaaatcgacttgacagggtctgcagggtggggcacaaaaggcatggtcagcacgcgctgaaagcgcgtcgcctccgtcgcgattttcctccttgggacttgcatcttaattagacccctagacaaccaacgctccctagggttctcaacgcccgacaatattggttggctgaggtcagaagtccaaacttgtaagaactaaggggagcctaacagcacggattacagtagtaaatagagtctttatttgactttctctggcatctaggtcccgctggtctaggggttatgatcctcccttagggttatcgcaactcaattgggaggggtgcagtgttcgagtcactggtgggaccgttctttttgccctttttgtgcttttttttatctgtctgataaccctaaggacgtcctgcaacacaccaattgaggttgggaggacctgctgacaatgcatgattgctgcggtagcctttcatgatggctgtactggcactccatacagcttcatgcaaataaaggggtgtgcaagcatatagtggcggaccctgtgtgcataaatccaattttttttacaaaatgcctgttcccttgcctacatcaaaatgccatacgcgcacgactttgcagaaatgtgcccatcgtgacacgctcctgggagtggtccgctgcgtgcgacctgggctgcgccacgcggtgatacagtgaccgagtcactggttggaccgttcttttggctctctgcgtgtgattcttttcccttcctggttttgcagtgcgcaggctaatgatgcgactatgtttgccattatgaacacgacgatgagacgagcttgtcagacgtcgtcaacgaggacacgtatcagagtcaccaatgtggccttgccgaaaatccagcgcgcccgccgtagtatgcagccaggcattgcattagctctctgattatcctgtgccagaataatgcggtgcgacgatccgcatggcgtatatctggcaactatatgacagtttctatacggccatgtcggaaagatccgctccggctgtccctggtcaaatgaatggcaagggaatgttgtggtcaaacgggggtttcccaaaacaggctcgataaaaaacgcctatcgggcctgttttatactcctccaaacgtgaacgcgcaggcgggacgtcgcaaataccagacaaagacaacccgcacaacaaagcaaagcacatactagcatagcatggtcatgtgttacatcacactcgtctgctctacctgtccgtccgacgccgctcatacggtctcgccaaacgaatccaaaccgagtcccaacccggcaaggttaccaccggcgctcggcctccagaggctcctcaacgaagcctctcctcgccaccatcgacgtccaaagatgaccgtctccctggcgaagatttcgccgaatccgagcatgacaccgttgatgaacgggaggatcaagttgatcccgaccacggcggcgatcctagcgaatgagcggtgggagggcgaggtgaagagggagagggtgagcgagggaggctggtaaggaggtcccgacaggggcgaaggagtggggataggtccgatctcgaccttgtcctcgtcatcgtcaccgtcgttgtgcttctcgttgagagatccttgggtcgacaaggcggtcgacgacgaggcaaacgcattgcccgacccggacgacgtcgatttcgatgacgactttgatttctcgaccgacccgctctgacccttgctctgctcgggagcgctgggctcggtggctcccttgtcagcggcaatgacctctgaagcttccttccacgaagttcctacggcctgacgacggttcgaggcgtcgccctcggcggtgaggaggtcatttcgtcgttgagccgaagcgggtgttgggtctaggttgccatccccctggctgatcttggaaatggtctcgtgtgcttcctacaaagacgtttgacgatagcagtcagtcgccctgctcgccgctcatacctgctgccgccctgcccgacgctcaccttgagtacctcggcaccttgcctgtgaccgggttcggccaacccgccggcatccccagcggtgagatcccgaggatccgcctcgacctcgtcatcgggtacggtgaccgaggacccatccctgacaatctcccaagcgtccctgacggcgttccatcgtttcctctccttgtcctgtttgacctgggaagatcttctcttttgaccggccttgttgcttccggaagccggggcgttcaagagctgttgcaacttggcctcgacctcggcgtcttcctcttcctgtttcttgcgcttttcctcgtcctttttcttctgcacagactccttttcaaacttgacgcgttcctcttccaacctcagccgggtgctctcgctcttttccctggcgaccgagctctccccgcgccagacctcgaggttcttgtcgagcaccgatttccagtcttcctcgaccttggcagtgttcttggccgtctcgacggggttctccacgctggaagggtcacccgactggtcgcccttgtgcgaagactggacgggatcgggagcgtcctcgttctggttttgctcggcggggatgatcagggtaggctggtcgaggtggatgtcggtcaacccggcctcgctgttcttctctttgggtgccttgggggaaggagggggaagagagaatgacgagacgaaggaagactgtggggaagaacgtcaaggtgagcgggattatagatattaggtgctggtctaacccgatgacgacgtgacttacggcgagcgaatcgtcgctatcgttgatctggtcgttggccatgtttgcgaatgcgtgtgacgtatgcgtgatctagccttctttgatgagtctgctcagtatagtctggctgccgtttgatgcaaatgtaacaagcaagctgtagcggtcgacctgaaagttgaacgatcgggatgtcatcgagatgatggttctggttctggtttgttgaattcctaatcaattccgcgtcatctcgcgtcattttcccgatttactagtgaaattggcaacagagctgcaaattgtcagacaccaatcacatcggacgtgaccttcgaaagctcctagtagcatcatcgacatcaacttgtccgccatgaaaccatgatcttgtcattagtaggtcgttatcatcatgaaagctaggacagtacaaggtgtacatagagagaaagacatcagcgaatcaacacgaccgatcgcctctgcggggtgcaagtacccccccgcttttcatgtcttttgtgcgcgtttcgtctggccgcgcgcgacctacccgtccatgacgaggtgtcgaatctcccacaaccgcttctcttcccgtctcctcgcccgatccatctccttgtccacgtctttacccctcatcctctccgcctcggaggaaccgtaccactgcttcatctcgtgggcgtgcctacgttcggcgagcctcgtctccctgtacaactcctcgtccacccaggtccacccggtcacatcgtaatccgtcgacccgtggacccgggaactggccatcgagaaagacctgtccccggcgccaaagtgtgacgacgacgacggatggccgggttgtttgcccgagagcaggttccttccctgcctcagattcaccttggcttcgacctcgtcggcggggtcctccgatacgtccgaatgctgggaccgggacatgctagatggggtcgtcgtatatgccgtagagacatcactgatgaaccgacgtccatacgccacgttgcccgtcctcccactaggttccctcatgtccaacccggtaaacgtccccctcgtgatcgtgcccccacctcccgctcgccgatcctgccagaacgcatcgtcctcgtcatccgccagcccttcgaacggatcagggtcttcctcttcatgcggcaacgtgctgatccaacacatcttttccggatcaaacatcatgttcccgacgaccctcaccgcggcgctcgaggttgacacgttgcccttgtcgacgggcgaggcaggcttgttcgagtggggagctcgataggcgatcaaggcgggtcgcacagaggaagtgaggtggttgtcaaactcgcgtaggacgccatagttgccttcccaacgtaaggtctgcgggttccaggtcatctcgccgactagaatgacgtatacgagtttgatcagtcggtactcttggcgacgtggcacagcagtgacctgaccgatcgactcgccttgtttcttctccagcttgccgagatgcctgatgagaccagcctttttcctctctttccgtgccggggtcgagagcgagtttacggaaggactaggggccggcggcaccacaggttttttacgcttttccgcagtagacgtctgcgcagacggcttcaacctgagagaaccagctactcgagtcaaaggtggcgtgttagacgactttgttcaaagagcaaaggacggtcacccgactcactatcatgatgagaaggccgaccgaggcccaacccgctgctcgtattcgccccgttcggtaatccgctgatgtacgaggcacgtccttgactcgtcaatgaactggatccgcccctggatagaggcaaagagctttcctttgaacgatcgaccaccaaatcgtcaaacacgtcaagttcggtaccatccccgtacgtccgtgtcgtctttggcttccgcaggacgtgagcgatggtcatgttgctactgctggatgtgagaggtagcgtcgagtgcgacgaatgtgtcggattgctagctgaggaggaaggcctattaaacgcagacccgagggcgggtctcgatttgggcttcgaggcagacacgggcactgtctgacgatgatgctgactctgatcagatgggatcctttgcatcgtgggcatcggtggcataggctggttggccgcctcgctgaacctttccctgctcttggccgcctggcgtgcgacgctggatgcggtcggcgcgacgtatgatggctgctcggtctgttgacttgccatggcatctcggagactcgcaagggactgcttcttggcgattgccggtcccgtcgccgtcgttgtgcgatcgttcagtctggaatgcgacttttgagaacgtagacggtgcggagtagacggtccagcggcacctgaagacgaagagatggcatccaccataactcgcccagaatccgtcttgcgcaatttgttctcgggggattccaccttgccactgagctttctctcccggaaaaggtcgcccgagtcatatctccccctggacccgcccgagtccttgcgcaaggtcccggtcgtccccttggaaggggtcgcagggggcaacctcgcctttctcaacctgctcaaccttccctggttcaactcggcgccttcctcctcgagaacgagaccgtcttcgaaagcctcttcatgggcatcgtaacgcgacttggccgccgaagagatggtggcgcgggtcaatcgtgaagccttgaatgtgcccgaatccggaacagattggctcttgttggggtgaccgtgtgccgagatctgcgagttggatgctggttgagcctttctctttcggtccagcagattgttcagttcgcggctttggccggacgagaagaagctggcggttgggagaacgaaatcgttttcaaagtcgtcattctcgtctgcgaccatgatcgacctggcgtgaatatcagtctcggattgatccgtcatgggcatcgatgccgaggtgatggacgtcgaactcgtgctgggactcgcaaaggctgatcgatgcgggtcgccaatgtcgcggtcccaatcggacctcgagctgttggtgacgagggaagatcgggatgaccgatgtctcaggccgatagaggggtagtctttcttgctggcgagtttgaggtgttcgagagtcaaaggtattgcaaagtctgcttcgaggtctccatcgtccatgggcttggcctccttgcgctccgcaggcttcttctggttgcccttgttcgccaacggttgtatcgacccgaaccggtcccttaggcctttgagcgtggccgatccagccttcaaagtggattccctctcatcctcctccatcatcgtatcaaaatcgtcccaattggtttcgcgttcttgcacgggccgagcgagtcgtaaaggcagcagtgcaggaccgctcgccggcagcttgaccgtcgcggacttctcatcaaacccattcgcaaagtcatcatcgtcatcgtcgaacgcgtcgtcgaaacgagaagagccgctgtcggcgcttctcgactgtccaaattgcccagacgcctgcatcaccttcatgctgtccagactgatgaaccccgcctttccgcctcccgaagccttggtcttggcatgtggcagcggaaccgaagggatgagcccagccttgagcttgatcgtgccctgtccatcgtccaagtcctcgatatcgtcaaagccggccatatcatcctcttcgaacggatcatccgagaaggacggccgagagctgttctgtagcggtgtgtgggaggacgatgatgcgaaacttgtttgtcgtgatgaaggagcgtggaagggtcgatctgaaggtagatcaaagtccccatcatcccagtcctctcgaggagcgattgtggtgacgggaggtagatacgccatggtgacgtagcttgatctttgtcgatccgtcgggacgaaactacaagtgatctgatggtagactattgcgaaagcatgatagtgggcatatgagaacaggcagatttggctcgacgtgagatccgcacgtacagctccgggtcagcgaatttgaaagagtcggaaaggtggtacgtaggaagtgtggtaggtgttttcttaatgatgaatgggcggtgtgcgtatcacttcgcaggtcggaggtggatgttgtcgtctactcctttgtcattgtcttccgtcttgtatctgcccgtgagcgttgaacatgatcgaaatcaagcgagctatcttgaattgaccactgggatcgcccgacgacccgcacaagtgttcttgatgtcttgaggatgtgtcggtgaaatgccggttgcgggttgtatcacatcaacaaactccaacaagcaggccccaggacaagcgatcatgcgaggtcacccgatctcgtcgtcgcgcgtccaagcgaccgcgaccgaccgatatgcatcatatgccgcccagcgtagctgagctggtagggtagggaaggagccaacaatagcccctacacaacctaggtcgatcgtatgcgtaaagccgtatgctagagtagtgaagatacaacctgccgagatttcaacatctatagttccctcttgaccaagcccaaaccagaagacacgctcccccaccaccgccctatccatcccaagctgatcttgttatagcgtaccagcgcatagacgatcgctgcggccccgcccgtcgctcctgctagtcctagatatgtcatcatcgtcctcgtggtcattcgacccgtcgacggtccccgcggcattgaagatgtggggtcgagcgcgacccgcgtgatggtcgtccagaggttgggcaccgatcccagacggacactgacagacatgggtacgggaagaccgagtttccgagcatagacgtcgggttgtacctcgtaccgctgcgtatcatcatcggtcagcttccgtgtgtaaatttcttatctgtttgcgctatcgtcctcacctgctgagtcaggtcgagatccgctttcgtcgctacaaagacgctcgggatatgatccagcgtgtattgttcctgcgcgcatcgcccgttcaatcaattcatggccacactttgcaacgagaaacggagggctgaactcactcggatattggccaaatatgagaacgagttggcatcgctcgagtcatacaggtagatgatgacgtcggccatgtcgagtttcttccgactacgcaagacttcgctctcgtatttcgacccaaactcttgcaactgtggtcaagaacctggatttcagcgcgacgagatcgtcactgggacctccccagagtttgcttaccaccaagtatttctcgccgccacccatctcgaccgagttgaccgcgctcatggtcctgctcgtaggttcgtacccaacatccccctgttcgcccccgcggaaccgcttgctcaagaaactcctcaacagactcgtcttgccggaacccgcagctccgacgacgtagcacaagaacacgttccgggtgacttttttctgccggcgttccgtcttgcgtgggcgggtgactttgagtgccgtcgttgtgggcatgtcgagggacgagggcgaagaagtgtatcccagactagaatccagcgcacgaggtttagtatgtacagcctgtacaaccactcgagtgccacactcactatgcgagatacgacaatgtcgtcttgtgatctagcaaagtggtcatgctggaaggaccgtccggggatcagtcgcggaaggtcgtcatcttgcgttctccctcgtcagctcacctccattgtgccagccagccttgcagcgtcaccttgcccgtctcgtccgttattgttgtaccagggaaaccttggggtagccagggattcccaggcgaagtcgaaaacacgtcgtcgagttctgattgcgagagcgcgccgtcttgatcctacgatatacgaggggccatcgttcagtgaccgtcttgataacgtgcaatatcatcaaaagcggactgacccggtcgtatgcctcgaaaatgtctgtgaggaattggttgcccaacggactcaactcgaccgagcaatcgccgggaacgtcaaacctagaatgagcagaaccagccgcgtatcagccaagatgtcccacatgcgaaacaccctgcacccctcgtcgactcgcctcggactcagaacatcgtcggtcaattccaagccttccccatacccaaactttcgcaagacggtccacgtcgtctccatcctgccttgctgtacaaagatggtatgcaggtagaggaaacccagctccgtgatcccctcggaaggcgtcatcgatgtggatgtgaccatggacatgacgggttggacgcaggacgggtcatacgctctgacgagctcgaggatgccttcgagctcttgcaattgcagaggcgtctgaaagcatttttgctaccatcgttttcgccatgggctgaagtcaggtccgagtgacgcgagaaatcgcgtagcgaggcagactgagcttacctggaaagcgttcagttcgttggcgttcaacagcccatccttgtcctggtccgagactttaaagatcctgcggagggcgtccgtacactttggtttcaggatctgctcatagcccgcttggtggtcagccttcgttccgcccttgcacttgaagtccgcgaccgaccacgtacatgttcccggctatcgtacaacggagccgttgggtgcaagacggccttttgtgcgaaataaaagacttctgaaacgttcaacgggatcttggccgaacactcaacgaccgtctcgatctcctgatcgaatcgacgaggccccattcgcagaacgacgcgcgacatgtcagctttctctcctcgtcctcctcccttgcccgccccgccaggatctccatcgatctagggagcgggaccgacccgaccacggacccaccttgaactcgcgcatgagcggaccgatctcttcttccaaagcttcattcgtcacctcgccacctcggaggtcgatcttgttgcctacgaggatgacggggacgttgacgccttcccgtctgaagaggggtaaccagtattcagccacccggtcgaacgtcgccgggtcggcgatcgagtagaccaggcagatgacgtgcgcccgggggagggtggtgaggagatgattacgggatgaaggggaagctgtcgatacaagtcagagaaaggccgggagagagagaggtgtcgcacgggcgatgctcagttcgaggcacgcgtccggatcgccagccgagtaggcttacaggaggaatccatgatacaggtcgtgacgttttccggggtgacttctggcgggatggtgacttctggtacgacgtgttgtacctgcagaatagacgatgcgcgttgcatatcgagtgggggtcgacgaatatagccgaagcgtgggggccaagatcagcatgtgggcgtcctttatcgattggttcatgttcgaccgagactcacgtgctgtacaaagctttctttgatcaagctggtaatgatcgtactcttgcccacaccatctggaaaggttccaagcagacgaaagccgcagtcttgatcagcccgcaaggtcgctggcgtgatacgcctggaagctgtgatcgggaggcagcttgatcgacgacgtaccgtctcccaccatcatgatcctgaccgtatcccttctaggcatgatgaagatgattcctttccgagcttttgagcgggagcggtcaggagtgaatcagatcagatcaggtctcgttcgtgcgaccgggtctgcgctatgcggcaggccgtgaagatgttcgaggtcccgaaagccgtgaagagttggtaatgagcaagtgggtcgccgcgttgatcgtgtcctcgatccaagggaggacttgctaacaagacttttggctgatgaggagaataggacgggatttatgatcgcgcctcgagcaaaataatgattgtatctcgttggcaaaaatgttggcctgatggtttgtagactgatgatggcgaaagagcagagagttggtcgctctatttacttaggtcaggttgctattgcgacctcgggcgacgagaagtgtgtaggcaaccaaccgtcaacacacacaaatcagcctgacaactttccctcccttttccctcccttctcccacttgcgcgcgcgaccacgagttcggcatcatctcggcatcacaagagagagcagcatcagcagcagcaggtcagtgtcggtcagtcggcatcggtcttgagcgagatggtgatcgtcgtcgtcgtcgtcgtcgacgtcggtcaggtcagctgaatgcaataataatgtcgaatacaaagcctatacatgctatacatctccctcactctgcaacctcctacttaatcaacgcttaaatcactcatcgttcaagaccgctttgttaaacccgactcgatcgcccggatcggactctcttctatcaggatggactacagcaacatcctcgagcgcatcaatacctcgtcatggtccgctcaacaagaacaggtaggtcgaggtcgctcctgccatatcaatagcctcgcaccgccctcgaccttctgatcacagagataacctccatccatatagatcctcctggaaccatatacctaccactctcaaatcccgggcaaagagatccgctcgaaactcatcgaggcattcaatctctggctcagcgtccccgaggatgatctggagattatcaaacgtatcgtccggatgttgcacaatgccagtctactgtgagcgtctacctctttgctccctgtttcccaccagaccccccatctatatcgtagggaggcgttcgatctcttgacataacgtatggctaacacgaatcagtctaccttccccccctcgtacgcctggaatccccgttcatctagtatggacgacgtcgaagactcttcagacctccgtcgaggcatccccgtcgcccacaagatctacggagtgccgcagacgatcaactcggcgaattacgtctacttcctggccatgcaggaactgtaccggttcagggcgtcgaggaagccaaaggaaggcgagaacgagaacgacaacgatggtgatggtgtcaagggcaagggaagggaagaggaaaaggatctggacgaggtgatcacgggtgagtcacgcgtgcgaggtcggcttcttactcggaggaacaccgttcggttcggttgaaaagctgatcctgacgggatgaacgatagaggaattgttgcagctgcacaggggacaagggctggacttgttctggagggatacgttgacttgtccgaccgaggaggagtacgtaggtatggtgctaggaagtgagtccttttctggtatttcgagcactagagggcggaatttgctaaaggtccgtcgttttgccatgcgtgcagagacgggtgggctcttccggatagcggtcaaactgatgatggcgcggagccaatccaccgtgtgagtccacgcacatcgcacgaggaacgcacctatcacgttcgacctgctcaggctgacctcttcatcccgatcgcgaccgtcggggaacgcatagggactacacgcccgtcgtcaacctgatctccctcttgttccagatcagggacgattaccaaaacctacagagcacggaatacggcgagaacaaggggttctgcgaggacctgaccgagggcaaattttcgttcccgttgatacacggcgtacggagcgagagggaggtggggaaacgggaaatcttgagtgagcatcgacgcgggtgcctactcgacaagccgtgtcatgcattacattatctgggcatgttcactgacgaccacgatcatgtttccctcttctcgcctctaatcagacgtcttgcaaaaacgtacgacggatcgatccctcaaggcgtataccgtcaagatcatgaccgagcgtacaaagtcctttgaatacacgagaaaggtattgaggacgctcgagcgacaggtgatggatgagattgtcaggttgggagggaacaaggtgttggaggcgatcgtcaaggggctgagcctcggcgaaccgcaggagggggaggaggcagagcaggtctagggatcggctgtgtaggccgggaggacaatatcgcatataataggtcggatatgtatgaacactagcatctactcggtcgaaagcatcttgcatggggggcgtgcgtttccaagcttctgcccgcccacattgccgctacaacggggattatagcttttggcatgatatgacctgacctggggtccttggagtgacgagtctgtggtcaaatccaatccgacccatcccccacccccacgcgcgcgtttacgtcagacctagtcccgcagcgacttcggtgcattcggcgaggtcgcatcaccaaccacaaccatcatcatctcccgcacaccagccaagttgtagcgtttgcaagctgatatcgcccccacccatcgatcataaacacatacacctctccacacaccacggaatctctcccggacctatttcattcgacaatcacatcttggagatagcgataacccccctcctctcgaccttggtcacttacagaacgctttccggacgattagtaaccaaaggccgttttgaccgcgaggaaccgactctccactctagttgataacgaggctgtgagctagaacgcccgtgagcctttcttcctccaaatacgacgatagctcgacctcgcatatactgatgaatccgatcgtgtgactgtctctttcgtatcgacccgctcgaccctccactttgatcgaaacgtcacccacctcactcgatgccgcgcgtacagcctttggatcggtcactaacccgatatcgcgaactagaaatccgctacatacctacgaccatcagaatcatcatcagcaactaggccgagtaacattacacgacattgacgataggagatcatggggaacaatcaatcgagctcgagaggtggtcgatctacgccacagatgacgcaaagacgacgagaacggacgcatagcggtggtacggcgatggaggttgacagcgtcgtgtcgaattcggtggcgaccgggaacacgagcggtaccgtctctcccgtgccagagactgaagcagactcacagacgtcgtcagaagcggatccgggtatgcagatgtacgcgtcgacgcattcgtcggccaggcgaaagaggtatcaagaatcgacatccacgtcgtccactcgatcgggctcttccaccacgccgaccgatcagaaacccagtacgggcgaccgaccttcgatcggtcgtcgaataagcagtgcctttggaaagaggaagacggagaggcggacgagcccctttgcgagtcgcggcgagtcgagcttgtccggactcgacaagggcaatcagagggagacgccgagctcgtccgcaccgctggaaacgacgcaagaggaagaacaagagaccactcgacgcgatcgtggttctaggggtcagggcgagatgaagcgaaggaggatcagtgggaccttttcggcgacgccttccaggaccaattcggacactgcgttggcgtcccgaacgcaatgtctcagtacggatgagaattcacttgatcaggaagaagcggaacagaccgccacggccatgtcagacgtggatattcctcctcgatctgctacactggtggaagaggtccagctagactcttccgccgcggctctagaacaggaaaacgtgcctgaagcagacgagaccgaccccgctgccacgcctttgattcccagtggtgtccccggatcaccaccggtgatccctctgaccgaagcagatccccttttggacgaccgcttgcgaaccctctctacgatttgggaagtcctcggatcgaacgtggccaggagcttgcctgcagtggctactgccgaggcggtacgtcgggcaagcgtgacgggtagcgtaagatcgagagaagccatcgtcgaaggtttgtcgactccttcccaggagttcgagccggtcatcccagatgcggatctcgccagtttgcccgcgttgcctccaagcaccgtcagcctgttggatgatctcgcggccgatgcgagggaacgggctgctgccgcccaggggtcgtcccccttggaagctttactcggcggatcgactactcaagtcccgacgatgatcgattcagagcttcctgctatcgtcattcctccgaccccggatacgcggtccgaacagatcgcacaggaacccccgcaaacttcgtcggccgatggtctcttacatcctcctccagcgcctactttgatgagcagacccagtgcatcttcattgttgagcaccgcgacggctaccaccgaggcttcgaccacttcgggacagggttcgacggcaaacgcttcgcaggaaaggcgacgtagtcgtatcggggggctggctgagcgggtcggcagctggttcggaataggtggtgcggacggtaaccccgaatccgatcgagcgcaatcggtcggatcagcacaaagtctcccagcggtgcctaacgaaacacctacgaccgctcctgatcctacgccgagcgttcctactccttctcctcccgctcgactccctcaaggcgctgtcatgatcgtgcaaggattcgtgcagacgtccatctcggcctctcaaggcaacgatcatggcgaagattcgtcggaaggagatgaaggtccgctgacgacatcgctaccgcttcgtccagacggaccaccccgcacgacctctacgcaacaggcgactcctgctacacttaatactgaaacacccgaggaaccgagtcagagcaggcctggcactccacgacgagtatccgagggtgatcagcctaggaatcagggagagggtcgagcgagccgtgcagggagaggagggatctttggacgatacaggtcgtcggcaacggccgagcctcccaatttcacagatcaagccagaatgctagccggactgttgaggtaagctcggaacgaggatatctgcatgtcggaactattcagctgaaccttccgtctttagcgttgcgacagctgccaccgcttcttccctgttggcattgccggcaggcacggatgccgccgccgcgcccgctgctggcattactcctcctgcccctgcaagtggtcctcgagctacgttggctgctcttcgtaggcgacttcaaaactccaacgcaaacaatgctcctcccgctaccgaagagaccggtctggaatcggtgcttcgctcgtacatgcaacgcgccatgaatggcaatacgatgagcgcgaccgctaatggtgacactgcaggcgacaatgcaaacaacgcaaacagcgatgatgatcaccccgctctcgccacgatactgcctgatgccgaagaagctagtttcgaggagttcttgaacaacatgcaatacagcctcatccgctcactgagagaattcaatggcgatccctcgctgcgagaggttcaggcgaccgcaagtccggccgtggcaggcgctgacgcaacaacgtcgcaagaaaacccgactttgagcgagaccaacgagacccccgcggctccacttgctgaaggcgttgggtcggctaaccgagacccatctcccgtggccatggaagtggacaacgatcaggccagtgtccattcgagcggctcgatcaattcgggatcccatatcacagaggcggatgcagacgaacaaccacctcgactcagcttcttccggatgtttcaattcccagcgcgggaccaacctgcgcctacaaccgcacctggtcctggtgaatcgcccgctcctacttcgttgattccagctgtcattgtcggtgtaagatccatcagccgcgacatcagtaccatcaccggacagactgccagtcaagctccgttccccttcagcgatgcggccgacatgcaggaccatgcggatgatacgactgccgcgcctgctactacgaccgacgtccccaccgccacaagagccgccctcgccactccgacgccaggtgacgacaacgtgtcagcgtctgcagatgtcccggccgccgctcgagccacgaaccaagccgatgcgaccggcactacggcatctgataccgacgcacaagccgtgcccaccaacagaatgatgcgagtgatccgtgcactagtgcagcgcgacggacaacgagcacgacaagccgaagcgcaggccgccgcacgagctgccgctttcgtcaccaacaactatgtcatctgggtcgtcggcgggaattaccctgcaggccatccgatcttgaccatcccccaccttttcactggagaactgaaccacgaggatctgtgggctttggcagaagccatgggacaggccaagcctcctgtcgcaaccaaagatgacattgccaaggcaggactcaaggtcatcaaaggatccgagattgaaaccgccgtcaaggccggacaagtgcacgacatgtgtcttgatcgctgtctggcaagtcctcgacttgcgttctacacctctctattgcatgtttgctgatgacgccctctgatttcgcaggtctgcctttctgactatgagcctgaagaagattgccgagtcatgacttgcaagcatgccttccatgtggaatgtattgaccgatggttggagactggaagaaacagttgtcctgcgtgagtcgcctgacgaactgacggggagcgagcacgagactgattcatacggtaccgtgtatacagttgccggcaagcgggcgtcgagactgcatctaatagggagacttccactgccgctgcacctgatcccggacccgcttctaaccaagacggaccgctcgctccagttcaaacgacccacactgaggccgccgcctccaacccagaccacgacgcgactatggcttgaacagcctatccaatcaatcggcgcctccatgccgtgccatagcgttcccattacgaccttttcatgcccacaccgactgcgatattgtatcattcgattggcgactgtagccccgcatatgttttgttgtacaagtctgaaccgagtgatcagaacaccgggcgccgctgcgtcatgtcagccgccgactcggttgcggcttttacggcatcggcgatcgccagattagagaggcaggcagtcaccagatcgagagaatggatcgcctcaaccctgtgtagtggcaggtgtaaagaaggacttgcggactggattccatgaaagcagtttgtatgaacgacgtatccatgagaatcttcagaatttgccccgcacctagaagcccctatagatcgttcgccgcagcacgtatccagttggcacgcagcatgtcttcaaacgccgccaaggaagagaacgtctgggactaccccaggtgatttgtccaggacggcgagagccaacgaaatgtcgagctgatcggaacatcttttcgactgcttagacctcctgcgctcgaaaagacagatcggtaggtcgtatgtttccatgccagaatgaccaccatgctgagagagctttgtaatctgtagtcatctgagggtcatctgggcagacgagtcgggaaatgagacggtaatagctgataccaaagagggctacagggtgttggagacaaggtaggtcgatgacgatcatctcacgactcggtgcttccgttagctcaaaaccgcggtaaattgttcttgatctaccagccaccctccgacgtattacctgccgcccgcttccatacaatgtcccgactcgttgcataaggaccgcaagcacacgttttgcgaatggaagggtgtcgcctcgtactttaatttcaagcctcccgggagtactggaacgaccgtagagaaccggatctggacgtatgaacagccaaccgagcgtttcgtgccgatcaaggactattactgtttttacgccagctctagtccgaccgtcaacagagggtccaacaaggcagggtggagatgcgaagtcgacggagaggtcgtcaagccgcaagaagggtgggttcatgcttttcgatcacagcctcgaagcaatgcctgacaatctcgtactcctagggacttttacggtggttgggttcacaaaggaatcaccggcaagatgaagggcggtgagtgccgagaatcatgtctggccggaatccatggcgtgctgactctgtcgggttcagcgaggggtaccgaatactggtagagcgctgaacgtcgtcccggtagatcggtcaaggcgacctgcgacctggagctttgtgcaacgacgttgccgtacaacatttccgaatctttgtatgattggattcaaaccgctcgtcatgtacaataatgaaatcgtcagataggtcgtgtaaaagaagtcgtaatagtcgtagtgttgttcgaagcgacgttgatgaccggcatcgatgatcatcgtcatccgctgacgggatgtctgaccagctccttgtagagatcttccgggagatccttggccaaggccagcgtgatcccgatgatcgaattcgcttgaagtggcgggaaaattcggagcagcttcatcggtctgagatcgatcgcgtttgcagcagggtccctcccaccttgtcagcctgtgagacggcgatcggctgcagggctatcaggttgcgactcacgacgagctttccatgagttcttgtcgcatcatcaagagctgagcgatgacgcagagaatgttcaaatgcaccccgaacgccaaaagaaagctggacccgtcgtatcgttcgaaggggggatcagcgacgtttaccttatggcgcctcgctgtactcactcccatagcttgaggacctgatcgagcgggggcgtgcaagcgcagagcgtcaaggcggctgaatagaggtgtcgcaaccagcgatgacgtcgatcagcaactcgacaagatcatgtcaggggaagaagcacagactcgactcacatgggaatgcatacaactctgccgacaagtttttcgacctcagatgagcgtacaattcgggatcggccacttcaaggcatttatccaggagcttccgtaccgttgcgcgtccgatatgttcagtattgggatctctcgaagtaggactctagtgtgccgacagacgagactcacctcgagtcctcgatgtactccacggagatctcgttggacgtattgcgggcaggaagtctcgatgaatgtcgagaaacaggcaaaagcctcgacctgcgtgggcaaggtgtagagaaagggcgccgagagaacgttcatccctgtgtgcacgtcggcgatcgaaggacggagtgtcgagatggatgatgaaggagaacattacgattcagactaggagttgagcaacgtgcgaaggaaaggtgtcgacccggagtcaagaggaaagacttaccttgtacataagagaaatccaaacctccctcaacccgctgtatcttttctattcccattacccccacatacgcaacccctgaatcagctcctgtatcctaacccctgtccgagcccgagtccacatccaaagctgacgctgacgccgacaccaacgccgactcctatgctcgtgtgaaatcgagcgaagaaggaaaagctcaccctgactcctccatacgaacgcctcgaggagacggatcaacatgtcttccctgactttccccttgaagtctgtatccgtggccaacgtccgaaaggtatcgttcctgactgcgagggcgagaggggttcgtgcgtaagagggtacgatcagattggggggtttcctttcggaatggaataggacgaggtacacatggtcgggcgacgagaggggcatggtcgggggactgggggactgacttttggtgctcacgctcgaaggacctttatctaccagccggagatagtctgaagagtctagatggtccacatggaggagtaatttccatacccgggctcgaatggaaggttgttcgggtgcgaggtttgtctgcgaggtcgggtagtggacaagtagggtcgagtgcgagtcagcgatgggacggccggagaatgttgcgatggataggcgagaccgtctccggaggacatcgagcttgggactcgatgagaaccgctagatgatggccagaggaacacgacacactccgactcgcctcttctggtatccctgcggtgagtacgagtcttcgaagtcgtttagcttgatccgagatgtcggacgacgtcttgattcgtgatccggaagcggcatggtgcgtgggctggaggatgtcgatgaaccgggctttgatctgttcgtcctgggacattatgactgatcgagtgggatgatctgtggcgaggcaagacctgacgatgtgatcgtatagcaagtaattagattgtgatatgcgaacatgtgaacctggtgaaccttgtggttgatgtcatctcgcgacaaacacaacaaagccgagtcgaatgagattgagctcatgacctctttacaatcactccgactactacaatcgttatcaggctctcatcgacaatgtgatccactcctgatcaggctcgattgatgatgagatgcggctaatcgagtctgacacagttgcatatgtactgtatatatacgataccgtctcatgacctgctgtctgttccgccctaagcctagcctagatcacgttctcccacctctttcgtcgcgtaacgcgtggatgagatcaacgtagatgaaatgaaatgtagcagcatcatcagatacctagcttgtagcctaatctacccttacaccttcaacccttcaaccataacctcgcccctcctcccaccacgtcctccgacctcgggtgccatgagcgacccggaccgtctcctcctcgacgtctccaaatgggcgtacaacggcctggtcgccgaaaacgaccgactcgtcgctgacaagatccacctcgaaggcgcgctcgagcagcttcaagcggatttacagcgcaagacgcatgcgtacgccgagagcgtgaggaagaacaaggcgttggagaacaagctcgaggatgaacggactagagggttgaaggtcaaggacaagtgggaggtcgagaaggagggatggaagcagcgattacggggcaagcaggtcaaggtcgattccctcgaggtagaattgaaagatgtcaaatccgctatccaggaagaacgagccgggatgactggacggatggaagccatgcaaaaggcccatacggagcatactagacggttggagaagcatttcagtgacgagctcgtccgtatcacgaccaaagtctcgcggttcctcgtcgaacaagccgacgaggccaaggagcgcctgtcgaatgggatgggcgggatggcgacgttgacgaacggatccgaagaggacaaggtggatgacaaggaacagggagaagaacgggaccagcgtcttgatgatcaagacgagatcgacccgagctttgacgatcacccgtacccgaccgtacgttcttctcaacacatccgcacccccagaaacccccctccccgcttcctgtggttgatctgacgtgtattcctgacctattcttcaggggccacctggaattggacgcgccatctctgattcatcgacgctcccacttcccgaactccgattgccagagcaacaagataggtcgaggtcgtcgcgctctgcaagcccgcttgacatggagcccgtagtcgaacgacgttccggacgggcggcaaaggaaaaggagaagaaagctgagaggggagcggcggcgcaagtcggcgagacgaggatgaacgggccggctggtcgcgaggcaggagaggataggagtggtcccgcgggtgaacaaggggtcgctgaacaggtgcaagaagtgccatttggggctcctctgccttgtttggatttgatcaccgtgaccgagaccacgacgacgatggtgacctctacgacgcgggcgatcgacgaagaggatgtcaagcccatccctgggtcatggtcgctcgaggtcgagatccccatcgcttcttcctcttcccggtctcccgcacccgccggcgaagcgtcccgtacggctgatcagggagtctcacttgacgccgggtcgatggcgggttcggggaaagggcgaaaatacactgctcgatccaagctcaagaggaagagtgcgagaaaggaggatggtcgaccgagtgacaacgatgacgatgacgaggagggcggtacgatcgtgcttcaacccagaacgagcagtcccatggccacgaccgacaatgcaggcaaagggaagaagaggaggatggacaaggtcgtagacgccggagcgagggaaaggtctgagcggacgggacgagctgctcccgcctcgaacggcaataccgtccctacgggtcgacaggtcgattcttcccctacgaccgcgaccgctcgtggacgtcgacgacaaggctcttctagtaggcgaaacacaccggtgggtcatcctcccagtttgcctcttcctacctcttcagccccatcatcacgcccgatcgaggaggaaagaccgaccccgtttatctcttatcgcccctcagcgcggttaagaggatcagccgaggagattggcgaatctgtccccggtctgcgcggtcccacaagagagttgcggtcgcgtgccgggtcgcaagcgggggcggcgggcaagagggtggaagaattggaggtcaagccggatgtagagatggacgagctgcaagtcgagcgaatcaatacggaaatcacggacgatatgggtttatcagggaggatgacggccgatccctttcttacgaatacgacgacgacgacgacgacgacggacgactcgacgccacatcgatcgagcgtctctaaacggtcccgacagacacccaatagtaatagcgccagcgcgaagaaacgggcgcggaaacggccaagtgagttccacgaagacggatctgttcggcagcttactgaatccgaacaacgcgataatacagtcgacctggatggcgatgacgatgatccgttgagattgtgaacccgtctccttgtagtcgcccgggtccttggcgtccgcctgcctatttgcttataatcatattaatccgcgtaatgtagcctccattgaccgagatagagtgaaagatctctttagtgtcggtgtcgatccagctcccggcggcatcgcccacttgatcgaagatgataacgaaggcccttttggccgaggaaggtatgaaagaactggccggcacacgggtgcaagtagttcctgaatcatacgacgatcgcacaaatgtcaaagttaaccaccgataaaggtatcaacggccaaggactacagatcctcgccacaatgttcaagttaatcctgtcttctgtcaaatcgttacatcacctgccacgaggagcgcgtcattccggatttcttgcctggccatagacctaggacgtgaagacagcttatcagctcacccactgtcgaagggtatcttcgggtcccctcgccaagtccttcaccattcaccgctttcagaatcgtgctgaatgctttcggtctccgtaaggaaacgcttgcacccgagtcgactgtattcaccgtcattcacgtcctctgtacaacggctttgtggtggcgtgtcgtctaatcgtatgcgcttgttactcttcggcatgcttggcgtttttcactaattccgtttcagccgccgagggtacatactcaaaccttgtcctctttctaaaagtcgtacggcctcaaatggcgatctcagcaacatactccaaacgctctgtaggaccggtgcacggctgtcagagccagtcgttcgtttgaaccctgcatgagaaccactcctacccccgccgccccggccgcacctgtcatgcccgtgccagcaatcttgcgtcattcagcaacgcaattcaccaatgctacggtacacggtccttatcacgtgtactatggtgggacccatacaacggatttccattccccaatgccgtaaggatccactacgacaatcctatcaacacacggattgaggagtatggccagaagatctgccaagcccaacacctgtttggaggagctgacaacatggcggtgatcatcaatagccgagagatagtggccgcgtttcgcaacggtgtaaactgtcgagtcactaggcggtccatctcccatgaccttgggcttcaatcttgccaccagtatttgcactctttgcggggatgagcttacttcttgttgcgttgtccaggagcgaaaaggtagacaagcgccgagtcttggccttgcccgcacctgggctccataccgcagaatgaatgtatcattgccgggcgccatcagggtctgcctccccttttctttggtggactgcctaatcttcaagagtgtaatggaaggtttacaaataaccaagagcgacagcttcaacgctaggacagccttgaaattgtcagcatacgcttgagtccttgagaaatacactttcccttgtgacgataggcatccccgaatatcaatcggatgtactgatcgatatccttgctcaagttggtattccttgtgggtgaggtggttcacggtggtttgacatacagcagaatggaagccggcgggctggtacacggcagacttacactcggcaggctgatatttggcgggctggtattgaggcgcggctgaaatggaattgcattcactaccgaaacgagtgtcagaattcggacgtaaggtgtcattccgtaaagcagctcgccattcccatcagaggggtcttcctctttcggcattcatgctggttgcggctcgagtgccatgtgccgaattgcgactctgagaacatcagagcgcgatcttcagtgactagagcgtctctttggtcgcggcgacgaggccagcaaaggctggatcgatcctccacgaagaccagaccaccctcgagatacgccctcggttgcgaccccatcgcaagcctgttatcgatcatatatctcatgcacactacacatcgcagcgtccagcacatctatcccgggatgagaggaaactctccgcctctattccgtcttggttttgactacatgagcgctcgcgatccgcatgtccaacctcttgaccatccagtagacggcgaaaaaggtcagcgaagccaagctgacgacgattggtttttggaatgacgcgtagaatgggtacgagtaggtgatctgtcgaagccgggggaaaaaggatgtgatcgtcagtttagccctcttgcccccggggggatgagaatacccggtattatacgggattttgaggaaagggcagctcacgtaaatgttttgctcgtggctctcggagcagagagactttttgatgatgatcctcggtcgaccggtagaatcgaggtaggtcttgtggaccgagtgctcgatggcgtctacgggaaagggtgcgatgacctcgacgttcctacgtgtcgcatcgtcggtagacatgcttaataacctgaaccctaggcgcctttcactcttgtccacgttcgttctactactcacttggcgccctccggtagggtgacgatcaactcggcttgatccacgacgacccccttgagacccgtcaagaagggaacagcgagcatcttcttgtccccctcgacggtcttcaaccatttccctaggtcgaggtcccacccgacggtaaactcgaaggaccatcctccgaggagggggaacctgggttggatctcgaggatggcgggacctccaccgcgtacgggtgaggaaggacggaagtgcgaggtagagatgttgcctatcgagtcgtagtagtaaggagacgacgcgccttcagggatggggtaagtgatctccctcaagatctgagcggggaaggtcggtctgaatcgagcggcttggaaatcgagcctggagaagaaacctcgaagcctgcaggcgtagggagttgacggcacggtacggtacctatcagacgaccgcctatgacgatgcggcgcaacgaccagagactcacttgggcccggcgttgaacaaggtgatcttgtcttccatgttcaagttggatccccagatcccgacctcggcgtacctctgcagcgtcttgatgaccaagacgggttccgcggtatcataatggatggtcaagggagactgtttgaagccgacggtggtgatgctcgccgggacgttgtgaaagggacctaggttgagtgaagaacccgcgagtttaaaaggtttcgaggtggattcttgggggaggtacgtgttgggcgtcttggagtgagacaggatctttcggggagcgctgtatcaaaggtcgacgtagggccggcgtgagctctcgacagggtcagtccctttgtccgtttctcgaggtcttggacgtaccgatacttgatcgtcatcttctttgttgggtacgccgtctctggaaaagtcgtttctgacgaaaactcgaggtactgggcttcatcctgcccgatcacctcggggaggggctttgattggtaggcgaggtgttcgatcaagatgatcgaggcggtttgttccttttgtgacagtccgagaggtaggtacaagacgtgggcgctgttttcttcgagacgatcagctttcccaactcatcgctttcctcaacggacgaccatgtatcggctgtactgaccccgactgtggatccacggctgccgctacctgacccagcttgttcttgttgacgctgacctcccaggcgataggttccttgcccgtcttgctcgccaggggcaaaacgtactctcccggctgatccgatatcgatcgtacggtgatggtgctcgtcaccgttgtcacgcttccaccgagctcgacggaccgggagatgacatcgttctggtacgatttggggaacgcttctacggccagcgccgcgagtgacagtagcgggaataagagtatcttttggagacgcatggctgctcgtcgcaaaggactatgtctatagcgatgatgtggagtggggtgcgctatgcgaggcgatgaagaagggaatcatgtcgaccaacgacctgcacccatatccccatgcatgccgcatattcgctgcctcttggtcagtgtccaggtacgatgcgtcacgctccaagtgaaatgtgattacgtaatcaaatgagacacccacacatatgcatacgtggtacaagcagcatccaatactaaacaaagccacaacactcgtcctaagacgctgatactgcggtggcagctccgcccacactggctccaccggcagcggcaccggcgccggcagcagcagccccagctggaggttgaccgtaaatatcgttacccgcagccatatgtcccttgagccatgatcggactgcacgttggcaaggaagtaaacgatatcagtcccgcgcgcagagtgtcaccccgctcggatcccaagtgtgacttacaagcagtgtcttccacgtcgtaacccatttgagctgtgggacgaggatcaaagcgaccgacatcgcgcaccgcatgatcagctcggcgatcccctccggtgcgacttcgatgcgaacgcgaggatcgaccgactcaccccagtaacctttccaagcctcgtacgtcccgctcgtatcggtcttgtcgggcataccgtcgaccatgaccggtgccaccgtcgcaccctgttgaccctcggcccctcccgctggtgtcccacccggtagaggaggttgttgctgctgctgctgccgtcgtccacacgtccagacgtagcgagatcagtggacccgcttcaatttttgaggggcgtcgatcgatactcacggcatatcccgcgtacccggcgtacccggcgtaaccctgttgacctccctgttgctgatacccaccgtacccaccgccgccgcccatgttcatctgcatgctcgcgatcgccttggcatgctcctcacggacgacggtcaagaggtcttctgcgagttctttcgcggcgacgagttgacgctcgtccggtccgctgtgatcgacggtatggggaaatgtgggatgtgagtatcaagtcgggggacggatgaacgaggcgaggcgagtcgagccgagtcttttgacttctcatttcgttcatctcgagctggcctatcagacgtcgagactgacctgatgtaaacgtgcataggttcgtcggcttccctgcctgtatcgttctcgatgaacccggatcccaatcccttgatctgtactcgagttcccgtctcggcttggatatacttgacgaacattccctacaatgccgcccgtcccgtcgagtatcagtgtcagtccagtgtcacacaccccgcacgacaccccgcgaggaacacgactcgactcgactcacaccgggaccgacgactttggctcggacgttgaaattcctcatgctctccaactggatcggtagtttttcctcgggccatttccgcttggcacctccctctctaccttcttcaaagtacctctccctgttctttgcgaacctcgatctgtcctcgacgagcggacccaggtcggcgttgatgagctcgttgacgcgtttgatggcggcgtcgaggatggtctgcgaaggagcggcgatatggaggtaaaggggttcttcgttcggggcggctttggatcgatcaggtagccagacacctttcgtggtgatcgatgcgccggtctctgtggcgatctacagcgtaaggaggaggagggtgggagggagacgggtggtgtcgctattgttctctggtggtggtgatatcgaatatgcattgtgtcgatagtagagagggtgacgagagcgcgcgagccgaagccggtcgcgtaggagccgaatccgcgtcgcttcccgtaacagcacgtcagcatatcatggctgtccagattgcatcacgtccagtcttgtcacgtcagttgtccagaaacaatcaggtgatgtctacaagaggtcacctgacttgccagagataatcccgcagagaaagagacaccaacatgtctgtctctgtttactttgtgtgtcttgtgcgtctgtctctgtttacttttctgttgcgcgcggtcattgcgctgctgcagcagagcaaacctgtctctctctgtcttgcaagatttgagacactaagaaaatacgtgcgctgctgcagcggggcatgagcgcatatatataggagtacaagaatggttttcagaccatgttttccgtctccaagccttttgggtgtgcacatggacattgtccaagtggacactttcagtggcaaaacagtggtctatgggccgtgtggttccgtcgatctctgagctgtccgcaagagatggccaaaccctgaaatgccatcctcaagagcacatgactgtgtgttctgtttgtgcaacaggccagattcttcccaaccccaggtgggaacctctctatgactaccagttcctgttcttccacctatgcctccacctgcgcgacctacacctcttcccgttctgtcacatgcgcaacctatgccagtccctattctgcctacacctgttcctccacctgcacaacctataccagatcctgttccacctgcgccttgcacatatataggcctagccctaatccttgaagcggatcaaatgggcgcaagcattttatccgttatggctaagatgatgctctcggacctgagttcacggggaggaatgcggaaaattgatgttcatcaggcagtgatgtcagtatctcgtttgacaagccatccgaataccatgctctgacctgctcataccacgagccataccctgacgatcttccttggtttctctcgctttgccgggccaacgcgccgatctcaggcaaacccgcgttcaaccgtagtcgctaccgcggtagttgccctcgagtgacccggcaaaggatcgacttcgatgcccaagtggaggtcgcagccgacgatacttgctgacgtaatcgcgatcgcgatcggctcgatccaatatcgtcgactctcgatgccgatattggccactgcgacctacatcatatccatggtcagcaactccctgtagatctcggaaccacaattgcatatagtacacatagccttagtccgctacctcgtcgtcgatatatacctccataaacatacaccatagatgcggtcgcagatactggagaagctggcagtcacgacgagcctcggagtatggccgacgatcggcttactctggttgtcgtgggtgatctacaagttcatcaaagcgtaccagggagcggtcgtcagtctacactagcaagatctaacaccgaatcactagtttgtagctgattccacttggctatggcaccgctgttgcagtccattcgtcatcatcctggcttccgtggtctttactcgctgacgaccctcgtcggccggcttctcccccgggacattccctatgtcaacgaatcgctcaactttgcatggcgaacacatcgcaaggcgtacaacacgcaccgcacttccatcctctcggacgtcagccttacggggaacggtgccttcttcttttgctcgacgccgagtgcggtgagggcactcaatgctgatcgcagggtgttcaggaagcccgtcgaagtgtacaagatcttgaagtactttggaagcaacgtcttggttacggagggtgacgaatggagacgtcatcgcaaggtcagtcgtcgtgcggtaccaaggggtcctatcccgttcgctcacgtatcctgcctactgtcccgcctacctccggtctccaatttctagatcgtggctccgggcttcagcgacgcagtcttcgagcacgtatggaagacgacggtcgagatctacttcgaaatggcgcgatcagaggcttgggatcggctggatgcggataaacaaatagaggtcccgaacgtccccgagctgatgtccaaagtgagccctttatcatggagtcttggcgacagcgatagtgagtaataatcacagctgaaaacccctaacccgcctggaacagatggccctgacagtgctcggtatgtctggaagagattgcaggctccgtcgacgtatcgagctgacgtagacctcgacccgttcgaaagctaccgcctctttcggagcacctttgagctggtctcccgacaccaaggctgcgctgccagaaggccatgatatgtctttcgttgaggccatcaccggtgtcagcgagaacatgttcctgaccatcgcactgccggacgtgctgctcttcaatctgcccatgaaaaagtgagcctatttccgcatatcatctcaagacgacccaagaatggagtcgaaagctgattcgtcgcttgtctctaggctacgatacgtctcgactgctgtcagagagctcaagtcctacatgtacggcatgatcagagatcgcaagcaggagatcaagcgaggagagacgggtagcatcgtcaggcgagacctgttcaaccagctcatcgctgcgagcttggacgaagagtcggcagccgccggcgagaaatcgagcgggtcgcagggtctgaccgatgaggagttagtcgggtgagtactgagacgacatccctggccagacacgaacccccgccgaccgtacgccgatcccgatttcctcaggaacacattcatatttgcgctcgccggacacgagacttcggcacacaccttggcgttcacgttcggatacctcgctaccaatcccgttgcgcaagaatggttgtttgaggagctggttcaggtcatgccggacggccaccttcctgtgagcgcaatttgatgaggacagctgagcataaccgtctgatgtcactatgtgcaccccagtcatacaaggactttacccgtctgccccgcacgctggccgttctatacgagacgcttcggttgcacccatccgtcaatatcatccccaaatacgccgcggaagatacgatcttgctagacgatccggcgagctggtttgaggaggttgaacgaggcatgatgcgcaacactacagaaatggaaaaggaggaaaagcgaagggtatttgtacccaagggtactcagtgtcagatcgacgtcgtcaacctccgcgagtcgatcaagcgcattatagaaaacaaatcagcgtactgaccttgaactttgcgacaatattatagaccgacaccgtaagtcggttctcgcaagggcttagccatcttgcagctgatgcccaaaattgacctcgacatagcggtatactggccgaatccgcacgagtttaaacccgagagattccttggcgactatgataaggacgcattcgtgcctttctcggcgggagcgcgaggtgagatgttatgaccatgtgtcgactcgaatccggctaattgcgcgatgacattgcgcaaccaatcggcaggatgcataggacgtaggtttgcagaaggtgagcggaccccatattattgtgttcctttccgaggcaaacgtcgaccaagatgctgttcctgcttgtagttgaaagtgtcgcttttatcgcgatgatcgtccgccatttccgactcgctccagccaagcgaacaacgcctgctggcgaaccgagcgcacagacagccgagagaattttgcgtgcgaaaggtggtctgactctgacgcccgtcaaggtggaactcgatttcatgaggcgcagtggagaaggtgtagcgcgaccggagtttcactagggtctgtgatgtccggtacatgaacaggataaggctatactgcagtcttcccatgagtcgacaggcgaaccgcttgtcaggctcccttcagctgcctcctttctccactccgaggatagagggttagggcatctctgaacaagccgaatgcatcgtgcgcaagggtcgcagacgtgacgatggctttggttgacctgagtacggttgctcttggtagttgctctattgattattcagagaaacccaggaccactgcttggcgtagtggtttgcatggaatgctaagttaatcgtcgcgtccgctatcttcgcgggccttcgtccgaaatatactgtatctagaaggataaacctgattgcgaccccctgatatgatgaattctacagcttacctacgcctcaggcggcttgtcaggcttaattttggccaatacataaacgagcgagagcggtcccatgtcgatggatgaatatcgcccggatgttgtcctgacacgaaatgaccgagacctagacagcacgtttcgatatgaaccgaaagaagtcttttgaccggcatttagaggcctgtcggactgtagagcagataaagactcatctgtccatgtcacaagggaggtaaaaaaaggtgtgaatcgctgaccggtgatggcgtagtcaacgatgcgccgctcgcattaagggcgcgcgtccgtctacctagcggatgcctggactcgcggtctaacatcgcgctgaatgcagaatccaacagccatacgccctaaggttcatatattgaacccctaagacttttctcatgattacgcttttcctttccagctgcaagtggaacatgtggtcgatggattctgcttggtggtatgcgggaacgccatggagacggaaaagagttcatctatttctggtatgcggagtgttaagagttttcggcagatggcagttccaagctcgagaccggatggaccttgtacccgcatactgggggatattactgcgaggcgtccatcccggtatagactgcccatgtgtccatcccttcagaccaggtgtttcaccagagtgaaccgattttgaggagtttgacctcggtggtgattatttgaacaaggattgaggaaagcactgggcgatatgcacgtactgcggcatattcgtgagcttctgatgttccatgggagtgaacgaatttcttgggggtgaagggttagtatcaatgggtacataggcgttttgatcgccggacttgtcagcaatacactcctcctggatgtttgaagcatgagacatggcggcgcttgagcgtttcacgatctttcgaattgtttccctcatgtcgaagtgcttagctctactcgatgatacaagcggaatctgacgacctcgtgatccatcggcaagatgcagtcaactacatgttcgtcggattttaggacagagtagtggttagggccaagctcctgacagagaaacctgttagtcgcgtcccgacttgattgcctttctttgaagaagaaaccgagaaagcggatggggtcaacaagcgcaattcctcgtatggtctggaaaggaattgtcgatagacaatgctccaaaagcgagactaaaatactctttcgcaatgatccgtgatgtctcgtgcccatcgagtctaaccgatatcagctcctgatgagatcactagatcagtcccgggtctaaagtgcccttctaagaatcgcgcgaaattgggaatggtcaagctgtcttcttgttgcgggttatcccatatacgaggcaaagaaatacggatagcaggaatagtacataggcgagggttatagcctgtctatggcaggatgccctcgtataatgacactggatcgatggatctctttatacactgcatcgttcctatcttggtgacgacagctttttcgttgaataaagcgaaaactctgtgtgctggcctcgaaaggatcatcgcgagccgcgcgctaccttgagaaacgcaacaggaaagacgatgtaatggtcacgagcctcacataaccccgcgttgtcactgctgagattctcagtacctgaactcgaacacaaccgacagggcgttttctacgacatttcaagcgaacgggtaatagctgaggattgactgttcggcgtgttacagaattgattgagagcccagacggccaagggacctgccaggataaaaggttccgggcagtgacgcgaaagtgacaattcgcgagtcggcctctacgtcgttctacgcgcgtcgaaccgcggcgcatagaaaaactaccatggtattgtcttcctaatctggcgccaacctctctgaatcttcttgcatcacgtgattatcgcctacaacgaagacagaaggatgtcggctcagctgggcccgggcgaccgtcgatcgacttctcttgacaacttctcctggcctcgaagctagtacgatatccccgctacgctacatctgagtttctcacaccgtcgccggcctctcctcgttgtcgatccacagagcgatgctgcacttcgaactagtgattttcctggcgaacgatcagcgctttggcccggtccacaaggtttttccctatgcttcgccgttatctcgttgaaacgactctctcgaaatctttgcgtacgcgatagtaatgcctcagggataccttaaggatcaatccgcacatcccctacgtgagcacgcctcttgattggattgcgggacgtagagcatcgagcgaatgaatgatcgaagtgagtcctagctcgacgatcatattcaagctctctgcgtttcctcttcgtttcgccgctccgggatcgcatctacagctctccgtagtccaagtttccttcgtcacattggaaagactatgcaagaggtgtgaggggagtactacccggattaagttgctccaagctgaccgacgactggtctctgcattcttagcccttcctcgtatcatcccgaaattcacttcgccctactatcgtcgtgctcaggattcacacggagttcacgccgaaatccatatcgctgagatgccaccgatcctgcgagccgatagcccctcgaagtatatgctgcggtcgccgcgatcaatgacaatcaacccaatcgcgcgatgaactgccctgggcccgcccgaaacctgttcccagaccgcccatctcgagtctcgagtcctaccaaatcaggctcagcaagatcgttgagagtccgacgccatggtgagatgggcacggtttctccgctcgactgtgctgagatcgaacctggcttcgaactatcggcggagagcctaccaggagcaaaaaggccgagagccaacatcgccaggaattcgcgacgaggaatcagaggacacaatgcaagtacgaggctctcagggaaaggatatcgagcgagcaagagggacagagtggatcgctggagtccaggtggctcggttttctgccaatttactcttccgggttgttcggtctcgtcctccgcctggctatgcttatgccgctcacaaatccgaaatggacacgagtattggcaaaaaaagacatgacgatcgctaccggtggtgatggggaaagaggctgccgatgaagatttcaccttccggtgcggctacatccgacctccactctttctatccgtttacctcctcgggcccaattcccgctctcgatatgaacgaggtggagatttcgacctggtgcacgaaaactctctcggcctcggcatcttgcatcagttccatctcggtacaaaggggatgaagatattagctcgtggcatggtcgaaacggtcgtggtcgagaacttctgcgaaagctggagcggcatcccggtccgggttagaacaacgccttgatatgactgtcaaagaggaccttcgcaccgagcagatacggtgctggtcgcgaggtaagatctggaaggggtgagctcgaccgggctacgttctgaaagatgatgtgcagctcatgttgctccccgtcttttttccgctcaagggttcgtcacacacccgtagagaccctagggcccgagtgttgtttgacatagcacaaatcactcagggaatgcttggggtaccccacaacctcgctactttacctgccctcaagcttgccgtgcgatctcctttgtaaggaactgttctaatcctatgagtagcatcgaaagaccaaggtcatgaacctcgaagtatttgccgcatgatcgcgaacaatccatgagcgagaagcatcgatggtaatatcctctaccgattgagtgaatgatcacaatcatatagttatcttgcacctgtcagattccgtgatactctactggcatgatagaaacccgagaaagagcatcgtttgctcagccacaatgattctgcaacgtagatagatactgagacgctaatttccgtctatgactgttttcttgttgaatgtatacaaagcacggaccctatgatcaaatactcacttggtactaacatgatcaatcaactttttccaccggatggtccttgtttgtgccactgatgtctcagcatgtggaacagaatgtcatactattacacgagttgtcctggccccgccctacctgaacatatccaaatccaagcaaggttatccatttgagcaagagaagggaaatgtccgtgatcacggaggcggtgtatagacttggatgatgggcaggctaaggttcaacccggatggccatctcaagggatgtattgttgtgaaataacaactagatccacaaagattgattacttgctaggtctaggcactgtggttggtgctgatgttgccttgttgtgaaaggatgatcgatgttgcttgcataaaagcaaagtagtatggtagagggaacagaaattagttccagatggtctccaatatatattattctgatgagcatgttctcctagtgtcctcccagtgtacttgcgactaggctgttgcggatttgcaactcagacgcatagtgcaactccagtcgcataagcgtgactccggtcacatgttgaccctttgtgcttgagattgcaccctgaacatcacctatgatgtcatagtatgccaatcttcaacatgtatcaactggtcaatttggtatatacgtggatttatcagtcagacatgattgatttcttgtcacgtgcgtcacgcttgccagggacctttctgctgcagtgaattcgtgctcaaagaagacagttgcgcagctagtgcggggcgccttgaggaagactaattcagagacgcaaattgaatgtatagaggtaataacagatatcctaaggcgtacacgggccgtgttagattagaagactgtctggtggtagcctttcagcgcagagtcacctcctgactagtaagggtatcgtgtgcacaatgagtgcatatatgcatgatttgcacaatgcacccaacagtccacccatataggggtgagtaacaattaactatcttccgcattgatcatgtacttgtctgggagacgtctctgcgattaaagctctttggctagaagcttgaagagcctttgaatgcagatagcagacgactacaactatagataagatacctgcgaacttttgcttagaatactcctgtaaaggatgaggaagaaacttttgtttgaacgtagcttcacaatcggtgtgttgtgcaattcaaacacggatctttacattgtcgagtttacatgctatgttttacattatgaatcagctgttcttgctaatactcgtttggcatggttcaagatgtggtatgatagtttgtcagggaaagggtattgagacaactgcaagcacccatcaaaccgtccgtaggaagtctaattctccctcaaaaaatttgccaattgggtcttgcatccaggcttctgggctgagtggcatgaaattgcttggcaaacatttgtacaaggtttctttgatgtctgtggcgggagaatttaggctaaggaagaatgccatgggttgatatgcattggtgggagaagaaagcaccactttcagtgcggctttgggtatggccatcccgcgcaaacagcagggatcacagggttacatttttggtgtttgcaggatggtggaggagtcttctctaagcagtaagctctgccactacctgtggtcccgttcaaaacaatgaggggattcacaagacctcccaccccatagactaagcatcgcagtaccgttactgcagaatccaatgttgtctggtagtttgtagacatcattgctgcttgcatatccgaagatgtcgtgcaggcattgtctgacaggatggagtagatagtgttgagaaattgcagtatctgtacgacgcggctgagccagcgactggtgccagagatctcaagtaaacggcacagatggagataaatcattgtagacactcaccagtcggccatgagttcacttccccatccgttcctctcgttccagtcacttatatactaattgcgatttgttggtggcagattgcatcagtagacatggtctgtcaggcgcttgacgcaagatgtcctatgagccagtaccgctcttttaatggactacagcaatgtaatgctattttgacatggctttcaatatacttttagaaagaaacaagaggtagtcctgatgatggtttccgtaaatataagagaatttgagccttctcatatctttgagaaagcttgtgctgtctaagatgattgctattgaaacaccagtcgatgactggagtaacatgtattttacagtaccaagagattaaaacgcttccttgctccacaatctcattgcatctgggatagcgttgagactatgtacattcgtgaacatcagcaattttgtaaacatcagcaatggcatctgtgtagtcttgtctcaatttgtgacagacatggtgcttgataaaccttcctgattgttgatgaggaagcgaaggtagaacagaactgggctgagtgcagatatttcaatcttttatatagctgttggatgctgggcatggtcttgctttgtacaacaagattggccgcctgaccaacaaacagtagcgctcatcgaaatgccatcttgtatcatgtcttgttgaattgtagagcccataattgatactatgtacaagcaataagcgatcatgatacagagcccttatccagcatgggtttaagctgtccaacaagttttccaatttcatgtgccaatctcattggtcttactggcacatcactttggggtatccttgtctagttgtgaagccaatgtgcaccctcaacctatcgattaggagtgagatagaggtcttcacccctcctgcgctcctctacgcttacaatgagtaagagcctgtcaaaaccaatagctaagagtaaccccatgaaaggtagccagctaaaaagtgataatctcccatgaaagttcgatgatcaatgcaatatgctcagtaatgtgcttgagctattgaaggtctatgctatgtttgtaaccagattgcagaacagtctcgatgggaagttgcatgtcagtaaatagcctctttatgcttgtgtcccttcacacaggggtatatctgtcatactagtgtgcagcaacatatcaacacacccagacgcatgtacttttaaaatatacaacttgctggtgttctttttagacctgcctctgtcgacattagaccagaactttcaaatttcacatataagatcagtgtaatctgattgaataccattacaaatggacaccaatcctaatcccgccatgtatatggaaatgtcctacaattcaatatccttgtgagaagcagctgtctcagacggggaacagaaacatgatcaatgtgctcctgatttcagagcgatgttcaacagtatctgggctgacagatgcttggagcagactcctgctttgtcacctcagtacgaatcctggtgtgatgaaaaatttatcaatcagttgagacctggctgtatacccatgcacaaatcgactaacattgtgggctgttcgcttgggttatcgggaaaccattgatgatttcacagagaagttctgatacactggcatgtttgacagttaaaattgtcagtcgcatgtaaacatgaagtaaacgtggtccactggcttgaaggttctgattggcgtggttccaatgagggtaaactttggtatggataggaataacgtccataaccacacaatggtcaatgaaggactgaaaggcatccatgggccaatccaaaaactaagttacaggtaaatgaaggtatagcagtgttcaaagcgtgctctcatgcagctttgactgacctttggctgtatcaaagtcttggccaactggggcagatctaaccttgatgaacaggacgatacagataaacaagctcatcctgaattcagaagcttttgttcaggcaacaatttcttgaaacagtgattagttgataatcagaatttgactcattgcaacaaattacaggcatgtgcaattctgaggactgggagcttattctatatcatgattttgcttgcgagagggacaccctactattgcagtatgttgtagtctaatgctgctagctgctgtcttgttctggtcggtgaaaagcaaagcagcgcagcagactttggagtgtaaggtgcttgcagcagtgaaaactgtatactgcaagtgttgcttcaccttctcatgatcaaatacagcatctgtagactggacacaaataatggttgatgtgtaagactgaacagatgtcgaccgcttcgagactgcaaatcttgcgtctctcacgatatcgatgatatgagtcttccggcgacgctgagtgactcgacggcaatgctactcgggcaagcatacgggacggaggacgtacatataatacaaggtggctacactagctacactgcatcaatccgcccaaggccccgtctcatcactcgcgctgcacgaccaatccgcccacataactcacgctgctatctctgattgactcgcacttggagctctgctcgtagcgcacaaactcaacttcgtacgcttggcagttcgtgcgttcgagaatggccaagagctgaagaatgggattcctcccacagatcgtgttctaccatacgccagcgtcagccgccggttcggatcaacatggcccttcaatatacgagcttaccccagttcgacggagatactctctgaatttcttgctcgtcccgctttcgcccgcaccacgcaggatattcatggcttcgtggtccatatactgaatgctctcccagatcggaacaccgagtttggttcctctcgacaaagtaacaagttcgggcgtggtagacgacctggtcccgaagacagtggaggtcgacgctgtgacgggtgggaccggggagtcaatgggcggcggcgaggcatagtacggagtatggctgaaacgagtgcccctattgtggacgtcacaacgcctctctcgtcagcctacatctcacgtctaattcaatcgccgtcagcaggacgtaccaatgacagaagtccgagctaatcacccaaaacgtccccgggtcgtcccagaacctgcccaacacgtctgcataccgcttcatatccgcggcagaaaccgatccaacgagaaggggaacgagcttgaaatcgtcgctatacccccgttaccgacacaatcattagcaattgacatgggagcctgcggggacgggtaagggggaagaggcggggacgcaccgagcaccgaaaatgtgtcggatataaggcaagtgcatctccaaactatgctcatcctcgtccgtgtcgttatccatcaggtcaaacatgcccgaaccattcagttgcgtgataactgttccagcagatccgaaaagatgtcaaccttccgctgtacgtcttggcaacgaagcggatccgccggtcaccttcgccatcaagcaggatatcacccagaggggtgccatacttagcgtgccgggacaaggcgatcttggagagatgatgatgatgagaaggaccaaggaggaagacagtcttgctaccgtcccgattgtgacgtcgttaagtcgatgagttgcatagcgaaaagatttcaggtctcgaaggggactgacatggaatcggtaggcacagcagcgtacgcccaagccgctgcaggtccggagtatgagtagcctgcgtgtctgtgaagccgtatcgagaaggggatcgacctgagcttgtgctgcattagatccaatcgagatttggagaacgcacggtccgatcaacgccttgcacttctcgatgggtggatcgtaattcaacccaggaatcgcgtgcacagccgagagattcttctccaattgagaccgtagagtgttggctgcgtgcagatatcgtatgaaagggtgttgtgatgtcgaatgagccagcggcgcggctcaccgttgttgctataccaactgccggcgtgtgaagggaatctgcaaggacattcgccggttgttggctaggagacgtagtttgccgagctgatctggatatagacgtacctcgtactcatgatgaatagagtcgttgatataggccgtgagttgtcgaagaaagagcggagccggaatgatcgggctggaccggtgtcgatgttaatgatggtaatcgatggggatgctgaccgggacgtcgtcggccggagccgagcccaaaatgatgacgtatcggccggccgtatccgccatatcttatcttcccagaacagagtttccatgagaaaaatatccagttcacctagaatgtagatgcgttattgaatgtaggtaaatcaaaggggaagctacgaaggagtttaggctttcaaagacctgccaaagattgcctgaacttctttaggctcaatatctaacactgcaactgtgcttagaaaagaccaaggctagcaagtggtagtttgcagtttaatttgaaatgacggcctagactcagtcggtaatatggggtaatggctggaaatgatactggataaggggtgtggacaagggtttgatgttcaaggtggtcgacaagacaaggatgcaaggtggtcctggagtcaagaaacagctgatagctgtacttgcaacaagacagcatgacttggtaatccagtttctaaaacttggtctgagacacataccgttaaacgaccagattcgtttgtctatgatataaaggacttctcataatagtagacactgaacactgcgtttaatgtgaatgtgcaagttgatataccaacatgattgcttaatgtttaggatgatttcaaaaccaagttaaaccagtttgtcattgtgcctggaaggtgttgggtcaaaatcaccacggaagtgccatagacaaccttgtgcagctgttcctggtaagccaagcagcgacttgctgaggtcgtaggtagatggagtcgcagcaaaacatttatatactggataaggagctattggctcaatgtgacaccaatttttgtgctccaggtaagatagtaatttgcattcatatcagcgtcttaatgattgagtgcagtgacttgctggataacaaagtatacatatggggagcacaagcagtagagatgtcagactaataattatggaactgcgatatattggactagctttaggtgtggtgatatcatgggagtccaaacaacttatcaaaccaatctcaacttatcgccttccagttcgatactatatgcgatcatatctttcatgctaattgcttgaagggtcacgtattattcagtattgttgttcagtaattgaactgaatagtgacgtggtagtacagaggaatggtcatgtctagctgcttggacaggatcttgcaaattggcaatattctgcacactatcacatgtgcaccaagcgattacttagcaatgtctagatactgagggtggcacggcacatatcgcttctccaaacgtgatttgggtgtgactgaaaatggatacctggccgcatcctccttcctcaacccaaacagacgcctcagcgggatggaggctcaaatctgctgtccctttactcaacagtactcttcagcctccttcgatatacgatcatgaaacttgagctcatgttgcaagataattggcttgtgttgttgttgattcttcttgttgtcagtgtctacagattgttttcctgacgaagcacatgcatatggtctaccaattttggtgaataatgcggacaaaggaacgcttatgtcgccagataccatcagtaattgtttgcaggggtgtttgcgtattgctccaccgtcaggtcacaggtatagatgtcgatggtgtggcgttacctagactttatgggtgactgaaattgagtcgacaggtcgcacgatagacccggttctgtggctgtcggatcccagcgtatccttgtactgtggatccttgaggtcaagaccttgactagaacagctagcaattgggtatcggtctctagggtcgtaaacatcgagccacagcataacatgactagaagtgtccccttcaaagtctcaagctcgattagcatggtctatcacatgtaacctagacactcacagtgaatagaccagagttcaacactgtcaacattgagtctggctctggaaagcttgtcaacaatgatatatcatttgtctaagtgaatatagcattgatcatttccagggtatgacaggtgatactgacattggtgatctcatgacagcgataattgcctagattctgtcaagacctgacaaaggtgctaaacattcattcttatcagtatgctgagtttacgccaccctcctcttgagactcaccaacaggtagagcctgactgagaacggtcaagcaatttttgctctagagtcttaccctggtgactacatagtcagcgtacaatactagaaagggccttcgcttcacgtagccctactgatatatcgttgatctaggaagcgcagctgaagcacaaagcgacaaccaagcgactgttggttatcagcactataaagttctggctgaggatatcggaagagcgaccacatcaaggtgcggggtcctgtaacaagacctcagcggagagaaggctagaacagatgcaaggttagcgtcacaatggacagcagatgcttaagaaatctgtgaaggaccaggcgcaatgatatgtcatacaacgcactcaaagctgattactgttcactgcatgaccgagcacatagagcgctagaggaacctgccatacgcgtaggtgaattcaaaagctagtcttccatacaatatcactaacacaggaagaaatgacatgatgagggtccttggtggatgtatagcccttggcaaagacctaaacaccaacgccaccgctgatatcgagccctaggctgagctaaatcaacgccaggtagtgagggatctatttcaaatttgaatgctatatacacttggttgtgcgctcaagcctaaataaggaaacttgtaatttgttctcagtaagttcacaaaccgtcaaactactttctgtttttctattgctataaacctaatgtttgtcttggcttgtggaggctttccattacgaaacatggtatcttatcatagcatgctgttggttagttttgggatgtgatgtcatgacctggggactcaaaatatctcacacatgtattatctcttcagaattgtgctcactctgtttgcttgccaaattgaatcaatcacaacaccctattttcttcaataccctccctaggacgagacaaaactctccaatagtctccatctgaaactgtgctctgtaatcccttgacagatgtatacattgacatgactgatatcgaacatgaacttgactgcagacatcaacaagctgagtctgtatcacaagactgcgtgttggcgagaggcaggacagacctgaacagaacacaaaggctactagacgatactaataattgttgtgcaaacatttggctgcaattgccagttgtgaacggttgtggggtgaaccttgctcgggataagccacgactgaaacatttcagtccaactacctttgcttctcagactgtcgcttgagggcatgaaacccgctcctacttcacacatgcacggaagagataatgactatgtgtcaacaagattcaaagctgatagcatgccatcgaggatcagaatcagctaagcaccgtaacaagtatgtaaatggtcagcatgaatctaagtcttgcaccccagacccacgcacgcaaacttcaatcacatcaatatttatttacacattaccctagccagccttggaggagatcctgcgctcatggaagctttgatatcgggacaatatatgtctgtggcaaacgatctatatagcttttccatcatgaaattcaaatttgttttggtcatgtttacacagtcttacccaaacacctcctatcttccccactctctgatttttcaaacaggcggagtctcatttactggtcagcctcctcctccgtgctgactattcgatccattcttataagaccgctgtataggaagcggtacagagaccatttgagtcagatggtgccaagaccatcggctgttaggcgactcgcagcatagtcctcgattggactttcattgcctttcaaaagattaatatgtgtataagtgaatgggtgatgtactaaagtacatacaacgacaagcatactcgaggctatgcagctagccagacttgcccttaatttacccctgcaaataatgacttaaagcacggtgtcgttcctgtcacatatagtgcacctacaatgaccattatcaacagcaacgattgtagcagacagctaggacgtaatttggccattactacaacctgcagacaattgtgtgggaaaagccagaggcagaaaatatacttcaagagacacaactaatcttatgagacagcctgtttcagactggctcaaacagtttctcagaggaacactaggatccgagctggatctccactgtacagtactttgtctattcaaagtttgacctttctggcggtgatgagctcctgcagcccgttgttgtagtcgaagctgcggaaaagtccagttgcctctgcatgcccgctgagaggtttgtacccggacagtatccgaataagggtaacactttggtctcccacttgtgctgcgtccagtgattcatcaccgcaggttgtacagtctggagataggctgtccatgcgtgagtcttgtcgggaatggccgcaacgaccccgggcgatagcttaacttcggactacagttcgacttcggcgggagttgtctggtcattatcaaattcgaaacccttgccctgcttggatcctggtttaagtttgaaaggtctcaatgaagttgactgttggtctggtctgcggcagatggggaaatatcgacatcaatcacaactcacctcgggtggctgtctgcaacaaatcaacttagaatgatgtgacaggagcggccttgtacgatatgcttgtaattccgtctcactccaactagattacctaggctgagcatgaatttccgcgagttagtgcaaggtgcaaatgcaaccttgagcgggaatcgaccataaagcgcagactgatttgaaacacaaatctctgttcaaggaaatgatttgaaaatgacagtaatgattgactgtagcagggctgtgtcagggcaaatggattcatccctaggcagtccgatggtaatgtatagagcattatcgatgacaagaggtcagtttcgctatgaacggcggttgtacagctcttgccagaagatgttcagtgagggtgactcctttccatataaggcaatataatttttgaacctttcgactcaagcttggaaaccgatcaggctatgcgacttcttcctatcgcatagtactatcgcatagtactatcgcatagtatagttgtatgctagctttaaaatttcagttgaatctggcactgtatgcagacgaatctggtctgcctgagactgtatttacacgagaatcgcagggtaagcaaatggatatcatggatactctcggtccaaccgattagttacaagtccgagtgattagcaaaacaagtaagtggtgcaagataccggtctacaggtcgatcccggatgtcagataagtgataagcacgccagagttacagaacccttcgttgaggatataatctaacagcatttttggcatatctagcacaaccctacgctgacttgttagcgtctgtagctgataactttcttgcgcgtgtgcttcttcagagactaagcgtgagatctgtgtgcgtctcgtaattgtccaatggcaagagctattggaatctggacgatttgggatcagtccgtagccgacactcatcactactttctgatatggccaaataaacaggctcgcgagacatggggcgtataaacgtggggttctgtgagccctgtgaaaggttctgaatctggcattgaattatgcttataaggttgactttgtggataaggtgtggtaagtcaagagttggcttgaaatcctgaccatagtccagtactttgctgcgaattaacagcaagtatctgtgagtcgccatttaatttgtacacagggtacaaggtttaaatcaggccaggctatttcatgagccatcagacgttcttatcaaagactagcaacaaacacaactagtgagacacatgaggtagcaatcagtcaaatgagaatcgcttaagtggcacaatgagatatataagtcaacgatcaattaggggctggatagctacacacctgcagctattcaatgacatcacaacactggcagtagatgacagaagttgatatgagctagatggtaagtgctcctctatgcagccaaaaaccagtaactacgtcatcttgtctgcagcccttttggaaccaaaatgtgcgcaggactgacatgttcacagttgcacaaggtaatatacaattcttttcatttgcacttgcgcttcagtgcgttgcaaattgttaagtacctcttgccctcttaggaccaacaaaactgatgaccatgttcatcagtctccactgctattgaagagcagggcttttgttgagctatcagtcgtatcctgtcatatgcagctctaagtggtgggtcattggaggtctacagcagggtaaatattaaatagcgtttgctttgaacaattccagatagcagagtcattcaatacctcttggtatgtgttagcaactctagtgtgatgagggctcccagacagtctactacatacatttcatgtcgtcttacattgcccatttgtgacatgtatgtagctgggtaagcaaacatcaggtgagtgtcgcaacagtcacaagagtaatatgcggagtatgcgaaatgtctgccgattcctcggctacaatcagcttgagctgaaagcagtaacttcaagagagtgacggatatgattaatggacgaaagcgagcataccctgaaaagtcacgtattcgagctcacgcgggtctatattttgaatgcagtgcaaccagtgatgtgctgaactaacgtggaacaacggcaatatattgacacaagccttcagcgtgcggacggaacatgactgatcgtatgatctcatatcccaaagcgctatgttactagagtaatcgcagcagcaaatgagaagagcagaggtagacaagagaattgaagcagggattggggtacgctccttactgtcagattcactgggatccttccacctccgacgccttctgtccttcttgtcaaggtgtgtagtaaaccaatattattccttttgttccaacaacacatacttcatctcttatcattcgtactggttatgttacaaagggaggccatgaaagcaatagttcagtcatcgacccgatatctgatagatacgagtatcagtcgattgtgatcaaactgaatcaaagcatacattgggcgagccggaaccttcctttcaggctagagggattatcgggtctcttgacatgttctttagtcctggacagacaggtcgggctggtttctgctacattggacaagcacgatgtgagttcatggcgatggagatatcgctctgcagtctcaacgtgagcttttcccctggcgattggctgtgattgggcgtttgtagtctcgatcgtgttcgggcgaaaaggggtgtcataaatcggaacagccagaaaacggcgatgagcaagcaacgaacgagatgtctgcgcgatacaacacaaatccattcctaatggccagtttcccgttagcgtttgaaacgctattcaattcgacgagacgacaggactaaggtgcgagcgtttgacgcggttgtatacgttgcgcatcgagaacgcttcgatggaaaatttacatcaggaatggtatacgtatgagcatcgtagatcataccgtagatgggagctacaatccacgcagcccgctcgttgacccggtcccaattcgactccgcgactcctcagacctccctgtcgatatcctgcaacaagatggtcctgtacctagccttgcccgtctctacatcctcgatcgatttggcggcctccttcatcggtctcgtcgtgatccacggcttgacgcccttctcgacggcgaggtcgagcatcttcaagatttcggtcctgcatccgatatgacttgacccgacgaaagctccattgggcgccatagcttgcgaggtgagcgagggccattcgtcctcgggcatgccgacaaagacaaagtgcgcgccgatttcgagggtggtgatgaactcgttcaacgggagcgaggacgaggacgaagtgcagacgatgatgtcgagggacattttgtatttctcctcgaagcccttgttggtgataacgaattcatcggcgcccatcttgagagcgtcttcctttttgcgttcagagtgagaaaatacctgtgtcgagaacgagaacgaggtgtcagctacctgcttggccactacacagcatcgaacgaggcgaactcacgacgacctcggcaccgagcgccttggcaaacaaaacggcataatgtccgagtccaccgagaccgacgacgccaaccttgctacccttgccgatgttgtgcctgaatagcgggctgcaggaggtgataccggcgcagagcctggatggtgagagcacaggacgaatggtcaactcgaggattctctccttgggcacactgacactcacatcgacgcggcgtccacgctggccatgctctcgggaagagggaacacgaattgctggtgtgctctgacgtgggtcgagtatcctccctgggaaaagtctccattcgggtactgtcacgatagaattgcggccgtctagtcagaaagtcgctagttttgctcctcgaagacggtagggggacacaccttgccctggtaagtatcggtccatgcgacggggcagtagttttcattgtcgtttttgcagtacttgcagttcatgcagctctgtcgaacggtggatcagtgagaatggcgacggcggcagcgcggaagggaacgaaaaggtttcaatgggatgatgtacgtatggaaagatagttgcgtcagctcggtgtcctcatgctctcactggtgacggtcagcgcatgtcttaccgaactctgagcaccaattccaacccgttgtccgacctggaggttcttgacgttggcaccctaggtttgcgacatcggcaacagcaacgagcagtccggagacgatacggggaccatccgaaggaggacgtcgaggtggttcggcgttgttgacggaaggagtgtgggtcgtgatccgtttggcatggtcagagagggaagagaacgagatgtaaatgcagatgagcccccggtccacgtctcgcaagcgccaacaagatgcatttcagactcacgacctgtacgacctcgccgacgatctcatgtccggtgacgcaaaaaggagcaacaaagggaccccatcctccgctctgttcgtggaatcggtcgttacgcgatggtaaacagggaatacaagcgaagcgtgcagtgagagcgatggcggtgggccgatcagtttcttgccaaaccgaccaggacaaaagtagccaggcgtcgttctcgactcacgatggtgtggtggtccgatccacaagtctacgtacaggtccagcaccgaggaccaagagacaagacggaagctgcgtatgagcaattggctggatgtcaggagtctctctgccacactcaccccgcaacattcgacgtgaacggtgacatcgtctgcctcttcccgcttgaggtcgtaatcggtgaggacaaagttcttgtagtccttctggtcgtgaatggcgtagctgtagggcgatacaggaacgaatcagtgagcgacgacccaattcacgacgagtgattgaccgggtctaatggagaagagaagacaggcgatgggagtggagaacgaggtacagacgactcaccctcgagaagagttgatcgacattttgttttcgttttcgttgttcgagtgcaggttggtggtgcgtgggactgggcgagatatccgttcttctccgggctataatgcaagtctagacggtttgcatcgtcggccacgacggcagggatgtgggccattcgagtgatcgagtgaacagacggtcgggatatatataccttggggtcgtttactcggtcggttgatcggaaagtgttcgggccggcaaccgggccggacaagagacagccgacagggagatggatcgattaggtaagccacagcgtgatcagatgggtgtgacgtcacgtacttagacccccccgagggcgtcttctctacctcatcacggttacttgatcgatgtatactcggtctgccgctatcacttccaaggcagtaccggagtaaacacaagaagcagctgtatgcaaacggtcagaataccggtcaaggtggcacaaatgaacgagccgatccaagcagtttgagatgtcatccctcgcgggagaggcgcggcggacggtgatcacgtgatgttgcgtttcagactttaactccagctagcgctctataccacttcggtcgcgtctgatatggaccgagatgtcgtcaggcgaagatgcactcaactattgcgtgtgccgccgatacccgggatcaatagtggatctgggagctttgccctttcatcgagtcggtgcggtcacactccgcttgtctcgtgaccataatctcacccatgcgcgagtgtgagtgtggctcgcgggcgttgcttcgatctgaccgccattcgtcgatctcagtgcggtcggggtggtgagccattccttatgctaccgctgtatcgccacccggactttcgttgatagatctgtatacgcttttgactgtcgaattccgtaacggtcgtgcaacaaccatgacaccgaattgagagacccacagacagttgcacgttgtcttctcgtatcaaacgtgtaaatggaccacagcaaacgagtttcgccagccacccgcgcatctctcgatgagatgacatctagtcaatgctcttctgtgatctgcgctcggccgattcatatgagctacatttcatatcatgcgttgcctgcggtcgggacgcataggcgttgctctcattgcgagccgtcgacttgttccctgtcccgggatgacgacgctacatcaagaggaaaggaggcgaggaggacaacaactttacagcaaccgataatgcaagactctcgcagaactagcatcggttacagcccatcgagcggatgggcgcatccgagcggttattcatataccacccattgacgctcagctgaaagctgctcacaagtcgtcttcacgattcatacaaaacgaagcttggaggagtggccacgcagagcttgcggtcaatcggtcaagtaatcacgacacctggcaagaaccgtcatccagatttgcatcgtgtgtgggcgaggaataataactgatgtctcagagcgcctgctatctgggcaatatctcgcccagggagaagacaggctagactctcaacgaaatacaatcacagaataccgtaagggtaaggtgatgaccccttcaaacaagcagtctcaacagcgaaactagcgaagatcagcgatctgcttctgtcgatgcgagtaggcggctcagtagtagcccggtgctcgccccaacatcaagatgacgcgctcgatgcagggtcacccagcggtgttgtgttcgcaagcgaggctggctgaattagaaaatggaccatgtccaccaccgggtgaaccacatgacatcggtcaggcagtgactatggtatcgatcgaaagagcgacaaaagcactgctcatacgctcacgatccccttgtcggccttgatattcagtctgtgatcggaaacatcgcgatggcaccttgaaccccggcgtcctctgccaagagcgaaccattgttcgagatacattgctcgtcgcatgagcaaccatatttcgtggcgaatgccaggcgatcatcaacgccgtctagcgccaattcgcatttccttaggcagttgcacaggggcactcggatctttatttatgtgtctttactgtacagtgtgcgacatttgagggcattaacctcgacgtctacacagaagggatatgggccgcggccattcatcgcgggcgattgctatttatcgtttccgacgtggtaggcaaagcacggcccttccagctcgaccaggagggcggactgggcatcgtccggtacaccaagcgattggtcgcgacacgcagtgtttgcgtacctttcagacgcttcgaaaatagcaactatcgttcgcaacgacagaaagtcatacagatgacgggacaggaactcgaggcaaaagcaacccaggaaccatcacggggacaaaagcggaacgacgaagccgaaacgatgtggcaggcgcggactcattgcgcggcctaccgcatcgtctccccggacactgtacgccaaaatgtgtacaaggtcgaacgccgcgcatgacgtctgatgctacgagacgactgtcgcgataaaaccggtcagtcctctgcctggttcgatcgacgattccgatcgccccagcatctacacatcgtcgcgacctttgacatttggcggctgcctgtccgtgtgtgactggcgccctagcggaccatgaagtaccgacatggccgacgatgatctcgacctggatctagcagttgagcccacacccctgatcactgggacgcggcgagtgcagatcgacttcaggatcgcgttcgtgatcatcgtaagccgtgtccgttgttttgtgctgtgggtgtcgtgccaatgacgaacccaactaccgcatcggctttgtacctcgagccctgccctgtacccctgatcactgagacacggagagttcagatcagagtcgaggtagcgaaaccgagtcgggggtcgaggtcaaagatcatgtacgatggcggtcgagcatgctgggtcgtgcgagggctactccagtactttcatcgacatcccggatcgatactaatctccacctaagcctctgatcactgggacacggagagatcgggttttgaatcgttgtcgttctcgcatccgtgatacagggtgaaagtcggccattttcgaagcgtcctcggatcgtcgatccacgacattatctctggttccccttgacccgaacctgaactcctgatcacttagacacggcgagttcaagtttgagacgagatgaaattgctgacgattggataccggaggtcgatctcggccgtcggatgccgatgtaagtgacgttcggtgcggtctcgacctagacctgagctcctgatcacgaagacacggagagctcaaacccggatcagaaccgcagtgggagtgcttcaaggcggtgtcgagatggaagtcgactcgcaagttgccgttccacaacgacacctcgacggtgaaatccgacccggtcaatctcgtcgacccgaactcaaacccccgatcactgagacgcggtaagttcgagacacaggtggacgaggatcaaggatcgtcaggcatgcggttgggtcactacgcacgctcgtactcgtcgtttctgatcaccaagatacggagaacgcacgagcagagtgacggcgggggtgatgagagcgtggcgattacgacgacgacgacggtctctgtccactcccgatcactaagacacggagaatggacgagaaccgacgtcggcggggaagccaagtcggtagtagtccaggagggttgccatgagatactgaagccgaacgacggccgaaagctgaccggctgttgtggacatggcggcgtctacccctgatcactgggacacggagagttgacggggttgtggcgacgctagcacggcacatggccaattcccagtctgcggtattgctggccttgtcacttgttcaaggtcgtcgacaggggtgaggtcgacgagatcgtaccctgatcacgaagacgcggaagaacgacctcgctcgacccccgcagacgagccccgatcgatcgatagcctttgagccacatcgcctcatcctctgatcactaagacacggagggtagagtacgatgaggcagaaagaaagcgatgatgtgagattgaatgtgaagccgagaggttcgacggtcacgatgaccatggatagagtatgtgttattgtatcgcttggatcgatttgttggggagaacggtggtggtggtgaaaacggtgcctagatgatagggattggctggaggatcattagcgcggaagcagaaaaggggaagtcgcgattcgctcacgatcaatggtaaacacgtaaagatgacggcatgctgacgtcggccatgatgagctggatctctcggagccgagaaggtcgacgctcttatcaaactattgctagacacactcgatcaatgacgtattagtcacacttccgcatgccaactatttaccacagttctcaccgtggtcacaccttggtattcctgctcatcgctcaacgactcactctacctactcctactcagacctcgatcgacgcatctcggtcttgtccgtacatccaagcggtgctgatatacatcccgacgagaccgactatacaagctaaacggcgtcttgactacacctcctcgtaggcaggtccgctgggctcatcactacctaggttggcgccgagctcgaccatgtcgtccgagacgatgccaaacgcatcatcggcgtaagtatcgatcggtcgagacatcaccttcctcatagatatgatcgtccgctcattcacaccttgctgaaccctcgttgacgtatactagcctacctacagtcacgacccccaatcctcccatcgtcaacaccgtcgttgaggcggcggcggacaaatccacactcaaatccacggtcaagctcatcaactcgctccagcatcgtctacgcagactcgacacgaaactcaaggcagctacaagcacggatgcagctaacgaacaagagatcaagattctaaaaagtgaaaaggagagactagtcagcgagttcaagagggtcaaggaggagagggtacgactcttgcaatgtttgaacgacgccgaaagggacatggaattagagaccggccggtcgaggatgacgacaagagcggccacgagagcgagtacggcggtgtcgtcgtcgtcgtcgtctgcagtatcgactgtgactagagctcgccgctcgatacccaagtcgacaacgaagccggctccgaccccgctcacgacatcgataccccccatgacctctacacatacttcgacgtcgactgcggctgtagcttcagccttgatcccgaactcgaccgcctcgctcaatacctcgcccgcacctatttctgcgtccctgtccgaagccagcatcgctctaccagcaatcactacggggtcgatggagccgacaccggactcgacgtcaaactcggcatctttggccttgacctcgacgcttgctgcaatctcggattcggcgcccatcctgccactcaacccggcgtctaccactcctatcacgccgttatcgtgccgattacccgtcgactcgacgccgtatggtcaatacgatccgccgtttagcaatcccggtcagggtcatctcgatcgaggttctgcctcgatatcgaccgcctcagctgcgatcacaataccaccggccacagacacgcctgcgagaccatcgaactcgtactcctgctcgtcatcaccattatcctcgctctcgtcgtctccgccgtccgtgcgacccaggaagatcacgctgaggatcaacctgaacagcaatcaaacgtccgacgcaaaaaccgtcgaagctgctggtgtgaacaccacgggggccggaactcgcacacctctcacgtccgccgccaccgacacacccgcgaccgtcgatggcgccagccccggcgtcaccgtgccctcttctgttctacggcgttctcaacgtccgacaaggatgaccgtgcgtgcctctgcctcggccagcacgcggtctacacaaatcaccttgccactggccgctcggtcgacaaggagttcggtcaggcgagttcagcttgacgagagcaccattcttgtgcccggtcatgccgaacagacccctggacctccaaagaccgccgagaccgctccgcgagcatccgtcaggaagaaaaaggacatcggtgcctctgtcgggaccgagaccaaggcccggccggccgcccaggcacaggccaaagttcgagtcaacaccaaaaagacacccgacaccactcgactccccgaaaagattcgctgtcaccatctcgtgacttcgacccggagagaagtcctgcagatcgacatgccttggtccacggtgacgtcgatgtccagacaagatccaggcaagacgaagaaaagtgccaaggcgacggcgaccccgtggatcaaggacctcgaacatctccaccgggtcttgtctacccaacgcccaattgacgaaccgccgagacagggcatggtcgagatcttcgattcgatggagcagctgttggcgagcgaacgtcaggcggatctcgccaggcgggcagacccatcatctccgtcgccacggccactcctccaggtgatcaggaatcgccactcgagccgtctgccaatgtcgatggacgacgccgttcgatacatcggcaaccaccccgaaaccgtcatcgactgggagattcctgggggacagaacggaagtcagaagcgtcctcgatataccgtcgccgaggccctcgattgcccggaaaagcgagccaagtgcttgggcgtcaagtgcctacccgccgactacctgcaagaggagagggaaatgggcaaggcactcggaatgattgccggcatgactacgtgcacaggagaggggactggagtattgcgtgacatgcgagcgggtgcgacgtcctcctcgaccagcaacaagtccacagagagggcggtcgatgagctgctcgaggcatgggcgggcaagggctccccgtccacctcgcgctgggcctccctggttcgttcaggcgacatcgtaccgtacaccccggaagaactggtagacatcgagaggacgacgaactggtgggggataatgaacgcgacaggatcattcaccgaatggcaccaggatgccgggggaacgtcgacatggctcaaggtcaagactggtcagaaactttgggtgataagaggtcctgggggtgaggttgaggccgtcttgctcgggccgggcgatgcagcgtaagcccaaaaggtcatttcggccatcatgttagcaggtacttatttcgagttcatcagcgtaatgagtccgggcgtcacgcactgcgtttttacagtcagagcgtccatctgcgccggcgggtgcggatggcgtcttcaagatctggaagcgacgtctcaagcgcttttgcgtgaatccatcaacggcgcgtttgagatccagccactttgggtgcctgcgctcgttgaatttgcatcgcaattgaccaaggatacctcgggggacgaagctcgactatacacacaacgcaagttggtcttgtcgctccttgatggcgaggggtacaaacatccgggaaagaagattaggcgacggcgaggtgattatctaggggaggatttattggactacggacaagaagaggtcgcgaagatcctcaaggcctgtgcgccggccgctgtacaggcagtcagggcgttgaggattgccttggcttcatcttgaggcgcgacggcggtttgtatatcggcgctggacgtcacgacgtcacgacgtgagtttagggacatatgacacccttaccacactgtaatactttgacctccagccactagcggcgagggataaacatcgcatcggtaatcttactgtttctccccccaacgccacgaccgccagatcgagcagtcggcgagtctcgctggcgatccgagggccaacacacgatcgagatcggcggtcactggacagaggagagacatccttatggtgccccgcatgtgcccctttgcacggcgaaggagaagatccgtccgtcgtttccagagacggtcacagaggtaatgagcatttgcttttcgtggaacccaaaaaccagcttgacttccgagacgcaggtcgaaagcgtgtcgctccggggtactacacttatacaaagttaacgctatcgattgaccgcggcgagtttagggaaccggaatcaagatcgatcctgcgttgccctttcgcaaagcagtttgaggaacccgattctagtgcgacaatcgtcaatcaaggtggggactgtccggaaagagtatgtatgctacatgctgtacggtcgattgacctatgcgttgattacaagtgttgcgcggatctaggcatccttctcctctttgccctgggtagggttctctacgtggtaagactggcctcggttcatcttgcctcgcttggcagccgatcggaactcgtcgtcaccaaagttgttctcgacgttgccaacacggtaggtggtccaggatcgagtaggtacgcccaagtccatcatgaccgagatctcttcaaggctagagtcgggacaagcggtcaagagtatcagcgaccgtcatctcgtgtcagggccaccgactttcaagctcaccttcgtcccaaagtctccggaatgcagaagtacacgaacaggaccgaaataacaccaccaccggcgtagatccagccaaccatgggaccgagattggcctggtcggcgtcgaacaggtagggtaaggtgaaggtgacggcccaagcgcaaatctgatgtgggtggtcgacgtccaatgattagcatcgtaacctacgtgcctcgttgcgacgtttcgaacttacccagaatccggcggttccaactgacatgatcttggtcttgttcttgccgtgcgagagttcggtggcacaagcccatgcaagaggtccccaagctaagttaaacgcccagacgtaaagcatgatcatggcgacgatggcggtgttcatgggtgcgcttcggtccttttcaataccgatggcaccaatgacgatgtctgtgacagtcatgaagattccggtaccgatcaagaggggtcggcggccgaatcggttgacgatgaagagcgacatgacgacacctgcaaatgtgcgcgccaaagtcagccagaggaggcgaacgactctcgagacaagacgattgactcaccgacgacctcgatgatatcgacaatgatggtgtacaagaacgcgttggtctggccaatgtcggtaaagaatcgagtggcgtaggaaaagatgaattgaacaccggaaatttgttgacagcacaaaattccaaaagcgcagatgaacctccttcggtcggcaggcacgaacaataggtccttccacctcgattggttgccttcgttgttcgcctcggcttccctagcggcaatgaggattcccaactcggtctcggcgtccaagtcttcgttgttcttgttgatggcctcgagcgctcggaaagccttgtcgtccttgcccttttgcgtgagccatcgtggggactcgggcacaaagaagagaccaataccgatggcgagagtgatcacgatgttgaaagcgacagggaaacgccacgaaaaggtgctctcgtagtccttggttccttgagcgatacaagcaccgatcacctgaccgatggccaaggtcaattgccaggtcgagacgatggatccacgaatggcggcgggaggaatctcggaaaggtacatgggcacacagttcgagacgataccgacaccgataccgaggatcaatcgtccgacgatgaggagcgagacggacccgacgatgatgagttggaggatgcatccgatggtgacgatcaggacggccgaccagagggcaccttttcgaccgaggtagtctcccaagacggaagccatcagggatcccacaaactctcccgcctggacgatcgaggcgaacaccgcggtgtaggtcgacttgatctcgtaggtaccggtgctcgcgtcgaattcaccaaagtcctccttgaatcgttgcatttccagcataccagtaaagtaggtaccatcgtaaccataaaggaaggcaccgagtacgaagacctgcgaagagcaaccagggaagcgctcagcgtatgtaccaggttgagtgccttacaagggcgtatacttacaaagcagaagaagatggctcttcggtttgacttgtgccaactgttcgaagagcaagtaaagagatctcgcgatcagagggtgatcatggataatcacttaaaccctcgacgaaactcacatgggacgggagacaagcccgacgagctcgtcatccgtgtggtttggaatagcagccaccatgattgatgacagaaagacgtgtggtttcctttgaacgagattcgaacaagaaagaaaaactggttgacatatggtaacggcggggacccttggagactttggggacgagtgtttatatgaatttggacaccccaggctctcgcccacacttgaaaaacacgacgagctagtcgagacgacgcagccccctcgtcgtcaacccgggcggtcagtcccgccggccggttgagcgaatgaggttcctgtaaaagttcgattcacctttggccgcaaatagattctggggtacggctgttccaaagccgaaagaaaacctcccgaggtcacgccccctcatctttcctgctgtcgttccgcccggctgccaaccgagcgcggcagtaggccggcggcatcggcaatggcttgcgtcggcactagatcggatagcatcggtgaatttgggctttgtgagaaccacggctcagccaccgcgtcatcgcagatgccaaggaggcgcttgcttccatggtcggcaggtgacctgacctgcttctaggtccgaccgaaacatctcgacggagatcaacgtcgagtgtgtcaaaaaagggaaaaagaaggtttactataatggggctgctaccgcggcaacacgcgtcatcaaggtagccgcgcggtcggccgccatcagcgatgtcgatgtccgctcgatgtcttgcctttctcttgcaacgtggtccccggacatgggctgagtatcttcgattagaatgtccgactgagcgacacctgtacgatcgttacgatcgcgcagaacccgtagcggagtcccaactggtcaaggcccggatcccggctgaagcgtcttccagccacaaggtcacgcgtagttagccgcccgaaagcaatgttcggtggtaaactcagtggtttccggcttcgtcaaaggcttgaaagaaagatcttcgatgacacgggcgattgcgggtcatggtccgcgtgcgtcctggtgctactttctcgcgaatcgtggtattctgagcagcatcgcctcggtgacttccatacacatcgcctcggctgacagcgttatccgtggggctcgcttcacccgttcgtgttcaccgactgacctttctgtttaccgtgtggctgatcggtatgcttgacttgcttgtgctgagctcagcgtgttgagattctctcattctgctcaggtcagtgggatgcagagcggtatagcctgcccatggagtgagataatcgagagtattgaaacgactgcacacgctgtctagaaccgctgttacgaagctttgtagggagtcttccgtgcagagtcgttgtggaacaatatcgaatacggccagaaatggcgaccgcgcacggattcaaatgtaaagtagagcagatcgcacgagtgcttttcaacgcttcgctcccacccgatatactcgcacatgccgttcaaggcaagagcatctggtctagatccacgctgatggtgagcgtccatcaaagcgccgaccactgcgcagggaaacgctgttccaactcaatctttgcaaatcttcgagtctaagttatgggtcaggtggcggaccacgcgtggcgcgtttcgtgtcagtcgaaacaagcgcagcctaggcccaaattcccgtgccgcaacatacgcctacaccgctgtgacacaaaagaagatggaactcgtgacccctgagacttgcgcgggctgcaagccacatagtctcgacaacacgcatcctgtgacctgtaacataactatttcagtcgcgatcaccatgatcgatttcttccgctcgtgtagtagaatcattgcgacccagtgctagaatatgggctcttagggatttagagctccagtctagaaaacctcgactgacaccgacatctatatcttttgtgagcttccgggcaccggctacgtatttccgggtgcgggctcacccatggtaactttcgcgcgagcgaactagttttcgctcggccgcgcagtgcatgccgcgtgaaggttgtttttgctagcagtgatgatccatgagcctgaccgtttgggacagcacataaacactggcagtgatcctcctatttggggaggtaagcgatcattccgcggtgtgccctgttgctgagataacgcagtgatacgcgcgtatcgattgagatcggcgcgactcacctcgattcgaccctattgaaggatcccatcggttgttgaggttgcctaatggacgaaatctagcttagtgcctcgagatctcgtctttcgataatgtcacttgcatcgcatgtcacagctagccacactgttcgtgacaagcggacttcaatgagtactgttgaccttcatggtgctgtgccaaaggtctcgcgtagtctgaattcgatgaggaggacattatcttatcaattggcaggtacacaagaggaagctctgcgtcgaagctcgaccaggaagaaaaaacctacgaggtgacaaattctctggaaatgccagtaacagatcgcatcgacatcgccgtggattgggaccagtggagcaacggcgtataggttttttttggtgtattgaggtgtagtatatttattttccgccaaggcgtcgcaagcgcggcgatgatacgtgtcctttcgaacacgcaacctgctgcgcaaaaagtctccaggggacctcgtttcaggatctgcgatactcgctggaattcgcacgggggagatgtcaagacacgaagacgtgacaatgtacttgcagacagaaccgcggctcgctgctcaagaacgtcgccgggcgagtacatgtcaaaggcatcgcagcggaacaaaaattcactctcggttgaccggatttgtcgcttccatatggtcagaaagcgaggcaatctcttcaagcgaattttttgccaggtccactcgagaagatcaaaacgactgcatctccgacgcctttgccgagcgattgcatcaccctccaataactaacccctgagcggaccacaaatactcaagtgcacccgaacgattcaatatgtcctacgttttctcttgtgtctatcttgaaaccgctgttaccattgtcagaacaacagatgtccagtgtattttttcttgtccggcttgacggttgattgcggcttgaatattcggttcgggtcaatcgcgtcctgtgttaaacaactttcgagccttgtactactggacacttcccgatgcaagcggtggaaagatacttgcacggcgaagctgtcgaacatgacgactggcaagactacgctccatcattggagtttctcaaccagactatgagcgcgatgactgagtatgtgtggttgatgttcgtctggtcaatgtcgctagcctcagacatcggtaaatggaaggaacttttgctggcgatttccatgatggtggaagaccgacgacctaaatgggattgcaaccacagcgatactgaccctgagtgaacgccgacgtaactcgtgttgccggtcagcacgcgatggactgtgtattatccagctcgagggggatccgaaagatacctaaatacaccattgatcagtggtagcctgcgggttttgttaggtgcagtgtgttcaggacatcatctcagatttgctactcagtaagagaaccgacgacaaacatttcccaccacacggtcggtgtctctccgatataaaagcccctatttcgcaaaactgttgtcgtgcctccccagctagcgcagcttaaagccgcaggtccgtgactaggaaagtccatcaaggtgaagggagcccgttggatctgtttcggcggtagctgcagcccgttcaaggtgaatcgagaggtaatgtggggttggttagttatcagcgcacaccacgggtcacccgcagctacacaacggtagctaccggaacatcgcggtggggccatggtatccggcggaggtcacgcggtactaccacaggtcatccgcagttctctctgatcaacctgtctcgtccgaaatccatataacgctgtgatcgatgacgtctacgcgggacgtacgttcatattgatcacgtaggtattcctagaggggtactgtatgacgtagactgatgattcacaacgatccttttgatcagttcgctcggtttcccctcagcatcctcgcttgccagtggcctaccgttccgcttcgaacggactgattcgcatcccgagagatgtatagcatcgcttcaacacgccgtcagatgagccggcagcagtcgttcaatacgatagacggatttattgctcgcctgttccattcgccctcggccttagtccgactcggctggtattagccgcgcactcttgatggggttcaacaccatataccgcacgctaacgagttcgccaatagcgaataaccgagtccgcggccccttggagaacccgacctcgcgttcaagttcttttctccagggaaaattctctgtctatccatgtgtcagagaggccactgttctgagacgggacgctgtagcgtttccgagcacgcagctgttgtttcatccttgcacaggccacttgaagcacatagctgccaagcgatcgcatgacgtctgttcaggctcaagattgacgtacaatcgctcgcactatcccccgaggtcaatccagacgaaattttcctgatgatatgcatgcttctggtctgaatgcgctcgctaagccgcgagaaatatatcacatgctgaaccgatcatatgtacaaacggataattgagcgaatgtgattggtggttctcgtaaggtaattctatgcgccgcttcatatgcgctcgataatgccacagccccgccatattggaactacagcttgcgtccgattttcttgagctgatctttgctttccgacagctccttcgtcaacttgttgagaatagtcttggacatccaattcgacccttcttcgccgctggacgcttccatcaaaaggccaattgtcgccaagcatcccgatagctgattgactacgtcttctatctgttccctggatgacggatcggcagcgtcggttttgtcatcttcgtcgccattgccgcgcctaccattgtcgtcattttcgtttccgttgtcctcatcgtcgtcatcttcattgttgtcctcatcgtcatcgtcactctcgtctgcggagcttctggccctgttcctatcagatcggcccctcaccttgccggtcgctcctttgctcttgcctcgacccttctccgctttggccgggctttcatagaattcacaagctttgccggaccgaatacagggcgcgcatctcgctcgtttcccgggaacagcccaacagtctttatccttcctggccgagatgcacgtattgcatcgcttggatcccttcaaaagaatggccttcgggtgatcgatgaccttttgcgcggcagccgctttgtgattcttaaccggatccttggccgtgtcggcgggttcgtaatcgtcgtgcgcatcgagatcgacatgacccggactgtgtatcgatcggaggctttctgttccccaattgccgtcgagatcgtcgagccgtcctccggctcgggagtccgatctggcgctcggcatgctgtggcggtttcggggaatctcgatcgtatcctctccaactgctccttccggctcggttccgaggtgacgcgttgtgtcattgccctggagattaggcggcggcagcatgctagggtgggacggatcagacggcgtagcagcagatccagatcggtggaccggtgcagtcgaggtagaatggtatgcagaccttaggccagcagaaaaggtgcccggatgttgtcgtttggcgtgatcatcaacggtcgggagtggagagtcggaacgtacgggtcggacaggcaaatcgatattgaaacgaagatcggtaccccgatcttgccgttcggatgatcgagtgcgaatcatctggatgcgctgtggtcgaaggccttgattcgtctgcagtgtaggggacgtcgctcgttgacgcttcggctggtctgtgtttcggctcgaatcggccggtctcctctgaatcgcaagaacgattggtatacatggtagtcagcgctatgatatttcggcgaaccgtgacaaacgggtcttcgactacttaccttcctgcgatcgagctccctcctgtcccgcttgttcctgtcgctactcgatgccgaaccagagtcagaactcgagttagaatccgacccggaatcccgatctgaatctcccccgagctccctgaatccacgtcttcgttcggtcctgccgccctgctcatatctcccctcgctgcctgctttcgtccgaaccgcggctcgtcgtcctcgatccgtttcggtatccgtatcgcgttgacgtgtttgcggcgactcggtccgatgatggggtttacgggtaggtgggtctggtgattgccgtcgaacgttgaaggctgagccgtggcgaggctgagggggggaggcgggacggccaggtcgtggatggtcttctctcagcaaaggagacgggcgacgttcggtgtcgattcgatcgtaaggtctatctcgtcggtcgtttctacgtcgccgccggtcttcgacatccgtcgtctcttcgacctcgtctctcgaagatctatgagctctggtcttcttcctcgttttcttctgcctgccatctcggtatgttcgcggtccatcgtcgctggccgagtcgccagtctttcgcttgagatgattgtcaaaggactcctctcgacgacggttgtcgggatgatagagcacggatggttggaatggttggtgggaaagtagggaagagtggtcaagcgatgccgaggtagagccgaaagcgagaggaacgatccgggtgcttcctggttaaaggttggaaggcacggacacggttaccccaacaaggcgatggctcagacgagggcccgtgtaagatcgtcaagactaggagctcaccgccgaccatcttggcaatctcttctcgctgttcgtctgtaaactcttcggtcgttctcaatatatgaaggttatatgagccggtctgggccgaggaatggtcgtgatgttgctgttggcgttcctgctgataccgcagctgaggttcgttgcgccgagactggtacagagaagaaggagatatgacatcggtacagcttcgtcagcgaggtcttgctcttccccgtctgtccgtggggtatttccagggccatcgtcgcgagcgaggacttacccgttcatcatccctcgacgtagcaaccgccgccggtccatagatctgtctttggttgtggcgtccgtccgaggtcatagcaacgatagttgatcgtattctagtccgtctaatggtgaagatgtatcgagatcagcggattgacaggttatctcgaagtccacgatgcgcatatcatcgtcgacttcgctgtccggtggggtcgaggtcaaggtcgacagcaggtggctcgaaaaaacgttacgtaatccggagccacgagcgcgaatgtgcgtcgacgcgggtcgcaccacggtaacgcagtggtcgaccggacgagagccaaatctagccgggctcccgataccaaagtctatcaatgggtttgaagtgttccaccaggtggaaggtgcgttgcaaaactacgcagaagaaggtagagacgcgatagcccaggatgggtctaaaacctggcggaagtggctgaagtctgactgcaacggtgaagatgcagaacagggtaccatggtggaacagtcctgtttgtacctgcacacggtttacggatgagcgccatgtgcgtccttgcagccagatcctgaagttgccagccatgtccagccatacagatgggcttcttgagcatcaggatgcaatgactctgtcctggtgtcacaattctatacatgacaagtgaggttgaggcaaagggtacagaaagagaagagagcaacaagagactacgctacatctcctgccctgaggacaactgttcccatccctttgaccgcattgaggcactctgttgatttgtagaagctatcattcaaacttgccgcctgtcaaaacctctgagggcggcaaagcacctccggcatcttgaagctattctgtgcaagttcctgcaaatgtgcttgtcgcccgtatgaaagcagcatgtaatagatatttcatctggtccagggaggatgaaggggccgtacaaataaatggctgagccatgtccttctgcagacgctagtcaactaaggtattgtccctgtccagcaatccgtcagctccctgatcagcatcttcttgatcttgtcttgtgccggcgtgggggacaagtccagatgttcttgttgatgggtaagcccaaagtgtactatgttgtatttcaaatgtgcacgcacaggagaggctgccagaggggtttcagtctctgaacacatcactctcatcttctcagtgccgttgaaagcttccctgatagacatcacctttccctccccagagttgacctcccagagcacggttttgtctgatgttatgccaatgtaccaagctatctcctccagtgtcaaggactcttgataccctcgagtcactgtaagatcagggtgaccattacgctcgttcacagccatatggggaggttcccacctggggttgggaagaatctggcctgttgcataaacagaacacacagtcatgtgctcttgaggatggcattttagggtttggccatctcttgcggacagctcagagatcgacggaaccacacggcccatagaccactgttttgccactgaaagtgtccacttggacaatgtccatgtgcacacccaaaagacttggagacaaaaaacatggtctgaaaaccattcttgtactcctatatatatgcgctcatgccccgctgcagcagcgcacgtattttcttagtgtctcaaatcttgcaagacagagagagacaggtttgctctgctgcagcagcgcaatgaccgcgcgcaacagaaaagtaaacagagacagacgcacaagacacacaaagtaaacagagacagacatgttggtgtctctttctctgcgggattatctctagcaagtcaggtgacctcttgtagacatcacctgatttttcctggacaactgacgtgacaagactggacgtgatgcaatctggacagctatgatatgctgatgtgcactgcagtactttgacgacccattcatatctactcaacactacccatagtaaccacttgaacatatagctcagtccgctggcctttgttgcatcgaatcatgggctgaattaattggtacgtctagcaagtctcacactcacagtcaccgcactgaccagcttgctcctgctctctctcttcatctaccttatcaaccaacaccatgtctaccatctgccccactactgcccccattcagttggccttgggcttgacttgtgtggtctgcaaggtcgcctttgagacttatcaggatgcagcagcccatacgtcagtgcagcaccaggttgccccagtggtgttcaaaggtcaattccgtcacaatgtatagctcaatgagcccgactgacctgtggttgcaggcctcgcgttcaaccgagaggtctatgacaacacccaaagtccatacttctgtgactgcaactggttgaccatcctgaccaagacgttcagggatcacttccggcactgcaaggccatcgagttgcggttggaacaggaggcgttaggaagggactgggcatttgaccatggcgacttggtgccgtcttgtgagtatggttcttagtggttaggggttaggggttaggggttaggcgcccataccgccccggtagccacctcggccccgaccgccgggacctcccatcccacctccaccgccgctgtacccaccgggagctggaggacctgctccctccctgcccttgagtcggttaggctctgtcgcccatcggaaacgtcagcgcacttgaacatccgaggattcaaggttcacggtgctcacccttgggagggatcttgtacgggttgccttgcgagctcgatccaatgttcaccgcgatggtcttgtcctggaacaagctgacgagacggaagccataccttgctgtcagacgcgcttccaaaggacatgcaccgcgatcaggacgacagcgacccacttgtgctcgaaccacgtcttgaacgcctgtgcgttctgcgggttgtaacaatacacccaggcgagacctttcgactttccattgaccttgtgttccgaaaacgtcacgtcgtcgatcttgatctggaaccctgcctgtgcggcggcttccctgatgtgctcgtcgttcgtccactaatgcccggggcggagccgagatcaatggcagagaatttgttagcgggtgcaaggggaatgaattcagggggaacaacgtgtgctcacccagttcaactcggacaggtacaaaacgtcgtcctctcccggacctccagctccagaaccagaaggtccggcaggtggtcggttgttatacgaaggtccgttgttgacgaactggctgttcgactgagcctggttgttatccgaagtgaccgattgaatggcactcccgatgttgggcttgacttccggctgactaggaccgctaggcgcgccctgatgtatgaataccgtcgaaaaagcatgttgtcagcttccattgctagctgttacatgcgagtcggccgtgcgtacatagtttccgccgtctacctcgtcaaagtcgtacaagtcctacaggccgcgacgggtttgacatgcgacaacgaggacacacgttcatcgagccagcgagtatacagccaagatcgaatggccgtatgcgagcataacgagtgaaggatcccggagacagggcaagacgtagcgaaataagatgaattatcagtacaacaagtctcgagatttgcgtagccggtacacctcgccggtcggtgccgggttagactaagaactgatctgggtacaaggaggattgacgaagcgtgggtacatacaccgtagtcgtcgtctcctgccatggctgttgctactagggtgtccggctgtttgcgaaaaggatcgattcaggctcgacgagctacaagtggtacagatacagtcaacctctcgggtatacaagcctcgacgtcaagatctttatacgtactaaatcaagctgaacagagtgtggttgaagatcttacgacagaggcaggtagctcactacagttggaagcttgacatgccttgaagatcgctggtgcaccttctataaagggtcaaggcgaggttacgcttagcttatcagaataagaagatgagaagatgtcatcgaaaggaaaagagtttacgcgtgacgtgtctttgagcggagctgatcaacacgtctcgaagatgaatccaaaatgagatcgatatgaataatgcaacaaagctctaggttcccggtggcaatgggcaagttcccttgttcaaggccacatcatatcctcgtttgatcctctttcacatctgaaaaagacacgcgtgtggaaaagatcagcacctacttttcccgccgaaacgacaatgactaaccatctttccttccctcgaaccgaaaccttcggcaccggtcgccccggacaaccgcttacggctggaaaagatcatcgaatcgaccagtccagcgacggtcaagactcctccgataatggcacacgtgctagagtatcacataagatcttagcacaagggttcaagctgtggccactggtctacgcgactgacgaggtcaaaaagtgagcaaagctctggcgcgtctcggtatgcacgaccttcataggagatacgtcgtagctgcagcacgatactatcagttcggatgtcaatggcgattctgtttcagccaatgcttacttgatgtagacaccaggaacagcggccatcccatgactcgtaaagtctgccgagagtcgtcctgtcaatatcgtttgtctccggtggagtcgctctcgatgaagcacttacgaccatgtccctcccttccaggagcgttcccttcctgaatatctctctcaaactgggtcacactgtactgctgagactggatggatcgtccatcgagcaaattaaaggtggtcgagacgaccttgaggaagtctgtcagggtagcgcatggtcagagcacgtatggtgcgaatggtcacaggatccgcttacactgatacatgtagtccgctgtccagggcccggcgacgtagtcagcaagtcgatctgcgcggatcactgtaccctccaatcgtactcacagacttcagggtgaacgacggcgccgtccaacgggttgacgatccccaaccgctttttgacagatcgagtcaactcttcggttccgacatcttgaacggtacccgagacgtcggcctcgaattgaaacttgttgatcacgtggccaaaatcgtggtggttcttgtccttgaggtagggcaccagatcctgcacgtgcatgttgtgggactggaaggatcgtccgtggctgaagtgcaagttgccaatgacctgtttcctctcgatcttcagcgtgacacagacattcccacacgcaagcacgagctgaccttgttgacccggatccgaccttgtatctggcacccttcagtgttctgctcggcgatcttttcggtccagccttctttgacacactgcaaaggttgagcagatggatgatcagctcataagaatccgacctcacattctgctgccagctaacgtacctgctcgatgccatccgggttggtaaagctccatcctttcctgacatacgcttctcggacctcgtcacacgtgttgcagcatcccgagggtccgggggttcctccataacagcttccgcagtagttgggatccttgtttgccacggctcgctggacgtccccctgaagcactatacaacgccgaatacgccgaggcagcgctcatcagtgaggtagacaacgatgaaagggaaacgcggggagactgacatccatccttgatgacaccgacgatcttgccattcttgtcgagtcggttcttggtaacagcgtgagtgaggtccatctgatgttctcctgaaatgtccatgatgtccattgaaagcactgtcataccgcaaagaggatcagctttatctcgcttgaccggctcttaatccgcaggaactaggcacgtacgatagcaaggcacccgagggaaagttatatcgatatctacaatcatcttttctcctcttgtacgatcgaccatgatagcaggctccaggtggatcctccgatagtcgataaactctagcagggtagatatggcgatgatagagaacgagatgaacgtgactacaaggggaagtcaggagcatgtcaaccgcggtggtcaaggcagagttcacagagaagcgtgaggagcactcacgcaaagctccggttcgagttttgatcttgacatcctccatcgtctaccatgcatcgagctggatcagtcaatcagagctcggaaacgcttgctgcgcatcgtactcaccttgccaaaggcatcgatcccggagatgttgccaaagaacccattgcgacccatcttgaccggcagcacgagctttcaaagaggtacttttgctgctctaactgcttgtagaagtaactggtgtacccctagatgtaagacccggtcgatctgaatgggactatagatgtatcgtgtttgaccgagcatggtaccgctgctgctggccacattcttcggaagcaaatgtacaaatccccggaagcatctttaccgcctcctcctaagccactacctcctcagccgccaccgcctcattgccttcccttgtctggaaggtttacaagtttcgatccctgcatgatcctttagcaacaaagtcccggggatggggatctcttggagatgtttggtgcagtagaccgaatcttcaggagctcgaggctggaccagtattagccgcagacagatggggatggaagtcggccccgggtaatcgccgccatgactgctgatttccagtctgatcagcattcctctcggcgatcggcaagcacggtaggctgcaatgattttgagctgctccgtcgcgttcgaacagacatctcccccatttagcggcgatgaagtgcctcagcttgtcctgttggaacctatgatcgcacgaagacaagtgcacggaaaatgggaggctttgaggcgaagaacagaattggacttgctgctctcgttcatcgtgtcgatcgacgaatgccctttgcccagtgttgaccagacgagatagatctgggaacatcgctgatgatagcgactaatggttggatccaacggccgggtcgacacatcctggcgacaacattctcgatctttgctgccgattgcttgtctaatatctcccactgccaattatcagtcttccgagccttaatcgaggcaggtgatcagtgatggctgggattaggcacgatatcggtttaggaggcagaataccctcatctacaatctttttgtatacgacgtttcccttgtgtggtccatttacgttcgttacagacaagatccatcctcgttacaacgtatagatacagtcgaccccactcgatgtcgtatatcattcgagtatgaacatctttagtcacgcatggctcttctattttggtttcggtcgtttcatcgtggcctggccgtcgtcgcgctcctcgcgagaccggtcgaacccgtgctcgtgctgtgcttgggcgccggccggagcatacccatcccattgttcatgttgttgaattcagcccgccatccagcaggtgatgaagtggaagccgccgatgaatcggtagccgactgctctgcgaccgtccttggcggagtcgcggtgccggtcatgatcgctgcgacgacggcggacctgttctgtatgcccgagctcaaactcgtcgaggggcgatgccgggacatggaccggttgaccatcgaactgtcgttggctgccttgtctcccttggatccgccgaagaagcccggtctgcggaggatcgacgtctttcgcttcggcttgacgggagccgtctcgaccgaatcggcaggccagagcgggttgttagggggaagcacgggtgatctcgcattgttagccgagtcgagctcgttcctcgttccgagaggctggatgatatcgtcgccgtatcccgcgtagatatcctccaatgttccctcggtcccgacgctcgcctggctattggaatgcgtcatacccttgggcgaaccaggcggccgaatatgggatggtgatcccgaagacgattccccgctggcgatcgtgctgagttcgcggttggacaaggacatctttcgcatcgcctgtccaaacattcccggtatcctgtcgttaggagaggtgttggtacgtcggtagggtgtccgccctgaaggcgtggccggttcggcatccagtacctccatcagaggctcggcttccggactcgattctaattccctcactaaccgagccgtagcgggtgaggcaggcgtcgggagtggaggaacaggtatcggaggcatggcgagcgcggcaggcgtggacgcgctcattgatcctcgtacgtgggtattgccacggaagtacgagtctgtcctctgtgccgtcccgaagctcgcgacggtcgtatacgaaggcgcccttgcgaggtccgagccttcgttgaccttggcccggacaatttcgaaagcctcatcgtactcgccatcaggaaactacaagtagagcgaggatgtcagccggatgggaattgaagtacgcattcgcatacaatactcaccctccgttcgatactctccaagaccctgcgcatcttgctcttctccaacgggccccatgccaacgccgtcaacaccgtatcctcactcgtcctccccgcctccccatcggcctgcccggcatcctcctctcgactcatagcacctctcacgtccatcgtccggaggtccttttcatagtctaccaactccatcacgcagtcgacggcacgcgcggttgacaaggggggctgtacgtacagagccgaggtgatggtctgaacggtgggtggcaggtaagcctcttcccactcggggatatcgatcggattgaattccttgccggcgggcaaggccgacgtcctggatgctaccgtatcgagcgcgtggatccggcgcaagacgtcgaggatgggcaagaggaccgaattctccaaaggggtatccgacgaggacgaacccgatttgaaagtcgaggcgagacacatcttgtcctcgatctcatcgatatccctggacaactgtttcttgcccgacttggtccatttctcggcgcgcatatagtctcgtttctcccgtacgatgtattcggacaagagttcgaacgcgtacccggccagaccggacgacgacgagctcgtggcctgtgtttgcgcctgtgcatgttccttgaggagtgccaacactttgacctttgtcggagcaggcagggggatcttccacctggtctcatcgtcattgagaggcaagaggcatttccgcttgaccatcctcaccactcccttcaacgccggccgcgcccgctcggtctctttgaccaaggcgtccaacgtctcgcccatcctgtacctcccgtccccctggatcctcctgcccacccagatccgaagacattcttccccctccctcaatgcgagcagggtggacagctgtgccgagagttccggaagggtgaggtatcccagggacatgcgaacgctgaggaggacggcagagagggacggaggtacaggatgagggaggtgcgaggagacgagggtatcaaatgagttgacgatctcgccgtaccccgctgaacctatcgaacctttcccaccggggggaccacctccctgacctgcccccgtcccgccttgcccggtatgcccacccgccttgttatccccctccatggtctccccctcgccgagcttgatctctagccccgaagcccattcgaccaagatctccctgacctggccgagaccgacgtccccgacggagaacctctgtagcgtctgtgagacgacgagcatgttcttgctatgcgatcgagagcggaccgagctcgtcgagagggaaggaggggtcaggtccgtatggtgtgggaggaaagtacgggaacgagccgtatcgaacgattcgtccagggtttgcggcacctgcgatggcgtagtcgtcgaccatgagttcataaatcagcctcggctcgtcgcgctccccctcctcgactccggcgagtcgtctgtactgaccttctgcatgacctcgatcaaccccaacgtcacctcatatatactccaccctttcctccgtcgtgccatgatgaactctaccaaggcatcgacggcagaatcttgagtcgtcgttgggttctggagaaaggagacaagcagggatttttccttcgtcgctggagaaggcggcttcatcttggatcgaggtcgaggtcgagctcagagccagactcagagtcgagggtcgggggacggcggtcaggggccggggctgtcgtgttcgttgtgggtggcgttatgaggtgagacaagacgagacgatggcggtcctgtcacgaagagctccgagatcgagatcaaacgagtaccgacaacgacgacaggtgtttatgtgtttgcgtgtatgtgcggttatttgaccaaagccgagaggtagagccccggtccggatcgatattaaagctcgctcctgttccctgtctgaacgaatgacctctagcgtgtagcgtccaggtgttcaagaggatcttctgaagagagggcggatgatcgcgaataagagctcgtgccggaaagttaagaagggtgtagtgtggtgtgatacgatgtggttgcgtgtggcgtggtaggaggggggggggaccttgacaacccgtgtcccgttcgtgtaagcagatccgctcggttccagctagttggtcgccccgtcgtgaacgtcgtgatgggtaggtagttcgaaggtcctctctctgtcaaccgcggtcttatagtaagagattagggtgaccgtgaggggtctcggtcgggttcgggatcaaggagtgtgaatgtgaacgtcaacgagcaacgtgagaggtgaacgagaatataattactccgagaattgtataactgcgagatggaccgggtagccctggaggcaaaatacagacccacacgaggcacgaccacaccccactcggacgtctacctcgttcgaccgattgatggcactgcagaccacgacatctccccttcgactttgcattgtttcgattccgatccgaggatatgaacaggtgatgcgatgagtgaattcgatgttgggagggttcccggtctcgccatctccgagctagtggccatgagagatgaagtgtctcggaagtaaattgcgaagcggacatcgatatcatgaatttgcttccgaactcccctcttctgccaaaaaaacgtgtcgatgtccgtgtcatcgacccagaattatcaaagtagacagtcgagtagagtagtagtgtagaggaggtcttgatgctttgcttagttgaaccgtccacaacctcgtcctagatccatccccgcaacctataccctcgtagtcataccctggctaggactcattcaccatgcccgtccaatcgtcatcatcatcagcatcatcgacatccagcgcgggacctcccacgcccccgatcgaacctccctcggcactcatcacctcgctcaccgcctttgcacgccaattgtccgaaaaggaacacttgctggccacttcctcgggggatgacgagctcgctagacaggctttagaggtcacgaagagtatctttgataccggtgagtctggcctctctctcctcttatccacatggcgtacaacaatcgatattgacatctctatcgacaaccactcgacctcgattcgacccttgcgctctcacccctttaggcctctcactcgaacccgcctcccagacgcacattcaaaccctcatcacccagcttctagacccttcctcactacccagcacctcccccgctacccgaccgacgacccgtcaatcctcttcccgtcgatcccgcgggccgaacgccgctcaactttacccccccaccccgctcggggaactctacacgcaagggctggatgaggagggcgtgtggagacagatggagatgaagggagggaagatgggtgaggtcttgaaggtcctggagatcttgccggcagggcgtccgggagcggaagaggacgaggaagagaccgtcatacaggaggaaggagatagcgaggaagaagatgatgaggaggagggggagggggaggacgagttgacaccagaggagatggaacagtggcaagccctcttgaaggaaaagccagagatgttcagtgaatgggatagtgaggacgaggagggggatgagaatgagaacatcatcggcggggacgacgacgatgaggacgaggacgaagacgacgagactgatgacgaggatatggaggaagatgaagacgagatggacgtggatctcgaagatgaagatgacgacgacgaagacgacctgatggatgacatggaggacgatctcgaagagctcgaacaggacgacgaggaagaggaggacgaagacgatctcggctcatcccactcgaaaccaaagtgagcatcgtggttccctcttgtctacctcgtttatgatcaactgaccccagccgtccccgctcttttgccgaccgtatcagtcacccgacgctggacgaccagttcttctcgatcgacgcgttcaacaggtttaccgaggaatccgaagccacgtcaacctcctccggttcgttgggcagcaagaagaagggcaagaaggttcagggcaagaggaagggattgctgggcgaagaagacgatgaagaggaggacgacgatgatgaggaagaggacgacctcggtctggatagcgaggtcggggatctgtttgggggtgatatcttggcagaagcgggtgacgagggcgatagtgagtctcagtctcagagtcgccatgaggaacttgttcgccatcgacctttccgtgctgatcaccgcacgcgcttctcccagacatgatgtactcggactttttcccgcctcctcgagaatggacaagggagaagccgaccaagggcaagggcaagtcgaacgggggtaccgaaaagcccaagaaaaagtcctcggctaaggcagcccctgcagagaccgcgatcgagtccgaggccgacggacgggataccatgtgccgagtccggacggatctgtttgccgacgacgaggaggaggacgcagatgtcgatgctcctacggcccgattatcgacacacgagaaacggctccgggcgttgcaagagcaaatctcctcgctcgagcaggaaaatgtcgggaaaaaggactggaccttgttgggagaagccaagtccaaagatcgaccccagaatagtctgttggaggaggatctcgagtttgagcagatgggcaaggtggtacccatcgtcaccgaggacaaggtcgtcaacatggaagagatgatcaagcgaaggattctggacgtgagtccgggcgtgcctctgatagcggctaccggcaagtgggcaaagcgctgaccctgttgacgactcgtacaggataactttgacgacgtggtccgacggagggaactcgacgacaaggcctttatcccatccaggtatttcgagctggataacgccgaatcatcgaaatcgctcgcccagatctacgaggacgattacaagaacgccgccaacggtggcaagatcgaggacgctcgggacgtcaagctgaacaaggaccacgaggagatcgactcgctctggggcgagatctgttacaagctggacgcattgagcaatttgaactttacgcccaagcaggtcagtaaccagctcgacatgtcatgcccggcgcccgagctgatcttacgtgttcccaccctgactacagcccaaggccgccatcacgacgctgtcgaacgtcgccacaacctcgatggagaacgcactccccactacgcaatcaacgtcgacaatgttggcgcccgaggaaatgttcgcgccagcatccaagaacgacctcgtcgcacgatccgagctggacccatcgcaaaagaagcgaatgagacaaaaggaccgaaagacgaggatgagacagcgacaggctctcgacagtgctgtggacaagtttgccggcaaatctggaggtggtggtaaggctcggggaggtgtcaagagccaaaaggaccgagcgctcaaggagctcgtcaagactggcaagggggtaagtctcggccctggtccaaccgcacggcgtgtacattcactgattcacttccgcgtccacaggtcacggtcgtgggcaaggactcggtcaagaagcctcgcggggatcgtcagccaagagagtccgtgtctcaaagctcgacgcttaagctctagtcagcgcagggcttcggcggcagtgtatgacggtatcgcgatttgctttggggcgtgtgtaattcttgaattgatgtacgaacaatcacgaccagaccggtatcgccactatatattatacatggtatacgaatacagaagtcaagaaaccagaccggaacccgtctcgcctatctctttccaccggcccgcctcaaggcttccgtattcttgaggatcgccaggtcgagatcgcccgttttcccgttgatcccggtaagacgttggttgtgcgtatcaatctcttctcctgcagccatggcgagccgtttcagattcctcgtcacctcgagcgtctcgttcaggttctcgtcaatttcatcttcgagctcgtcgtcggaagcggtagcttcgaattgatacctgcttcgagcctgtttcctcgcagccatcgcgcccgcctgaggggtattgtcacgcatggtcccgttggcggcttggttgagtcgacgatgggtatcctgaacgtctgccctggctttctctcggtcgtcccgttcgcgaagatgacgctccatcagtttctcctgctgagcattcatcttggcttcctgcaagtccggcggttgatgtcgatattagctagggctcgagatcgagaggcaggaccgcgactcgccttgttccaggtgacggcaggtcggaagagactcctgttcaacaccttgagctccttggccttgtcttccgcacgctggttgttggccttggcgatatcgagatgtcgctcggtgttggcgatacgttctacagggtcgcatagccgtcaaagagacatgagccaacatgtagcttgactgtagggctcataaccccgaagacagattcacctgactggtctcccaagcggcccaaagttcctcgagcggtatcctctgcttctcgagcgattcggagggcgtttctgtgtcatcagggtctcgtgtaagctgggtcttgattcgagcggaacaacgcgacagcttacctggtggaagacaaactttcctgcttgatccccctcatctcctgcttgataccctcgatctcttcctcctcgtcgaaatcgtcctccatctcccgcccctcgtacccatacttgcggtccttgggaacctcatccttgggctgaaatccaccgaacagctcaccacgctgctcattggccttgttgtctccataaggatcgccatcggtggtccggtaagaaggagctcggtcaagagcgggtgcatagggatcaccagcattcctcctcatgtcgacgctggaaccaccgcctcggctaaagagctgtgttcgggccgcaccggtgtcagcgggagccatgggtgcggctggctccggggcggccacgggggggatcatggatgcgttggcattcttgcgtttgaaaaaggacatgtttgtagatcgtacgatgtgagcgattagtgtcgacacggtgcaacgggtcgatggtgatggtgatgatatgatgacgatgatgatgaatagctgaatagctggagtgggagtggggctgttccctctgttcggccaacgactcgagggtatccaggtggaaataacgcggaagctaacatgacacaatcaaggatggcggcctgaaactcattggatgatccctagtttcaggtcgatgaaagggctctggacggcgcctggcgagcgtagctggaagataccgatagaggctggtagtattatatctgcgacctatccttacaagttggagaccagtcccgtccgtagctgacagcattgagggccacgccaaaagttatctcaagttaacgcagcatctcacaatggccattgatcctaacggcgagtgagtgtcgcctcaggctaaaatcactaacagcactgataccagttaaccccaacctgcagattctggaaagaattcacggacaagaataacagcgattactggggaaagatcgatgagaaggatccgtaagctgtcgtccacctgtctctcaaactcggtgtcgactaaagagcatgcaatgttttcagtgactcggtgagggcagtcgtatccaaggcgtatacttggatcaagaaggttaaacaggaagatcccgaagagtgagtggaatagtaacacgaggcttacgctcgcgagatcagaacttgatcgcaaattcactgcactagggtcgccaagcttctggcaagggaagagcgaaggtgacgcgttcgaattgtacattgtgtatctagttttcggtcatcatcgattatcttaccatgttgaggtatctccggtagctacagaatcctcccattccctggcgtcagcggaaccggcacttgaacaaagctctcccgctccgccgtctccgtgatgcggattctctacgaaatcgaacgccgcacatagagacggtcctctcgagaaagagttcgctgcagtgccaacaatagatctgctaagctttatggtacgctgcgaccaggatggctcgactaccggtcgaccattgtcgatggaaggcaatgactcttcgggtccgctttgcacagacgggtcggacacggacacaaaaacgaactgcacgtcctgctcaggtggaggtgatttgtacagttccgggatttgtttgcaacgttctcctagactgtcttcgatgagccaaggtatcgtggtatagcataaatcgccatctgtgcttttttcgatctcgtgtctccactgcttgaggattgagatgacatcctcggccaatccatgaaaacgcaacgtgcagtccagaaacttaaggaacttctctttgtccatgtcttttcggatcatgttccccttgtttataggagccatgtcaggatacgatcagtcgaggtaccgtacctgttggtccggcgctcatataaccaagtgccgtcgtttggatcctggtctacaatgctcgatatatatagtagacgacgcagcatggctaatacaaggtaaggggaggctatggtgccttagataaaggagggaagtttcggtgtcacgaggtagataagatgttgttctggtggcaatcaacatgatcgatgcctgtgctgacgatgcgcctggcgccaccaaatattcagactaaggaagtccaccgggaggcttaggcatgcacggcggggagctgagcgtccttcaactttctttttagatattcccaaaaggtctgtacgttcgttcgagacgatccgttataccagtccaatataatctggacagatggtttatcacccttctgcgcgtgcgtttcgggtgaattctctcgtgcactccgcgccagagccttatcagctttgtttcgaaccagcagtcggccgatgaacagaggcggagttcgtagcgggatagcctgtgacgccgcgttccttgctgcctgacgacgagcactccgtgaccaagactgcgcgataggccggacgtcttgatagtatgtttcggtttctgatgatcgttgccatggagagtctacggatccctcgcgtctcaggccgatctccgccagaatccgatccaaactctttagagcagcatgcattgagctcgccgggatttctatatcaaagctggtgggaggtggaagaaatccagccagggccggtgatgggatcctggtaaggctctgcagtgttttcagagtcagtcatttggcagtctgatgggaaacactccgcatacatctggcaaccgctgatccgtaaaggtccatccgacgatccaccttgccgtacgggcttgcctgattgtcgtgatgaagtagttttcgatctttccgaggccgataagctatgtcaacggattgtaaactgctatgcgtatcgattgtcatgtgcttacctggctcgtgcgtaacttggcatgtaccggagcgatagaagacgccttgcctaggaggctcgtgtaccacctactgggccagattgtaagcggatcagacaagcatgtgaggaccatttccgtcactcacaaggcaccatcctgtttatctagactctcgtcgatcattctgctaacgaactttacttcgcctccaggtgtaatgagctcattctgagcagctgtcggcaccgcatggctggtctccagcttgatattcgatgctgctgccatttcctctctggacgtataaaatggagggttacacatagtgaaggtgaatgcttgttgcctgaagtagcagggcgcgctgcatcagtgtcggctgatgaagttgccggagtatgtcatatttacttcgcctcaagtgcctgtgacgccggccgaatgattgcgccttcaatctctgcctcgcaaagattgatcctctgcgctagatctgggttgagatccagggtgtgttgagcgtactcgagtgactctcggtcgacatctagcacaaagctgtcagattgaacggggactagaagaggcgtcgagtactactaaccagtcgcccatatagatgcctctgggtggagtcgcgccattagcagagcatatattggcgttgctcctgttcctctacagacgttgacttcagccgatctagttcaaatcttctgacgccggacaatgagacagactcacacgtccagaacctttaacccatgggctaccgggatcagattgtgtcctttcaagtaagcgaaaatctgggacaataggcagacatagtctagcctgagggtaggcgaatcagccgggctcccagccattgcctcatctgagcctgacgtaccgatttgatagctattgttaccggattcaagcaagtcaccactcagtccaggttgaaacccgccgtgccacatgctgactgacagtgggacacaatctatcttctggcaaaacgaccttcacgtcgaaatcttgcaacaagagacacctcgtcaactctctcagagccgctgcgttcttgaagtcgatatacgacgcgccgtttgggtgataccggacgctatttaagttgaggtggtgcacaattcgtcatttcagtgtcatgaaggtgtttcgtgagggagaaggaagaggctattacaatggcttgaaagttccgaatacttctccgagctgcttgaagtcgggtgggctattgtggtagggattgacgaacccgccgtttttctcgccgaccaaccgtccaaaggtctgtttcgtcttcttggcggagccggcatgaacgatcgccttgaccctggcctggaaagaagatacggatcagattgtttggtcattgaagatagcgatcattccactacgaacctccagctcgaaaagataatcgtcctttaccaaggggtacaacgtccttaccgcttcagccagctgaaacaggtaatcctgatgatgatcccaatgtcgcgatattagacagttgatcttcgagctagttcaaactcgagctctcactggattcgggccggatggtccttcacatgtagcaatcctctccgctaattggtccatcggctcgtatcccactgagagtcgcatgggattcctgatgagcaaacgtcgttgaggtgcgactcggtgaacggcactgaccaaaagcttcgttgcttgtcgtgccgatccaacaggtcgcctagatgaaccatcagcccggatcagcattatgagcaatacgagaggcgaagaaagccttgcaatagctcactttcggcacaaccgtctcctcctgctgcgtctcgaggttgagcgaaaagacttctacgtcatgtgcggtgtatccgttctatccacactgatcatgttagtcgcggctttcgaagggtgttgcggagcactctgaccttctctcgatgtactgtcatgatttgaagtccacctaatcagtaaccatgagtagcctggaacgtcccgtatacgggctaacctagataatcccaaacttctttctctttttcctccgctatccggtaagctacgccccagactgcatcttcctgcgtggaatgcgattgagggggctatgatggccatgcagaagtcagctcggcgggtcggagaaggctgcagttctatactggacgcactactccggcgagtttgtgccattccgcagcttcgagcacggtgaccaccctgcctggacgttctggtactcctctatgatctatcgaagactgggcgaatcttctgagtactcccttcacgtagccactgcctgcaaggtcagtcgcaggtagttgaagtcagccgagctcattggcggaaattgactgcttgcagtgtgttgcccactgacgttgctcgactacgtgtggtggtggtttccatatcaacgacccatacccgaatacccaaagcatagcgagaaccaaggcgaggggggactgggtttgatcgctgaacagtgtgcgttaattgaacttccagaatttcgtagaatggcatatgaacatctagcggttcaagtgggttatgactcatgtcgactacaacttggttgatcttcgaacgcgggacgactcaaacggaaataacaggggaaacacgaaatcgtccggattctcgtcacacgatctacaaagcgccggggctttcgagcatagcccccagtaccgttgttgcatgacaggcaagcttgaaaggctcatgatgataggaatctccgtaacaatgttacccttatcttctcgagagcacaaggaggaaatcgtcggttgatccttcctcatgacgcattcaatctgtcccgccatcgtcaccgaccccttcgtccgctgctccccccacatttccatctcctccatcaacatcgcccgcagctgagaagtttccattccgtctcgagtttgtgccttcttggattctttgacttagagccaacatgcctctagcctcctctacatcctcgtcgtcgtcgagattctcgtccgcgccctccccagcctcgtcgcccagtccacttctaaagccaaagccttccggagcctcgctaccgcctcgaaggggagcccagctggcgttctgcgccttttctttccaagcatcgtcctcgtcctcttcatcatcatcgtcgtcaccatagggtgtggcttcgcgaaacaacggagtcgattccctgccgagccccggagtttggctttgtaaacgggaaggtagagccgatgcgttccggttcgacggtccaggggtacctctgccgaaagaagccgagggtgtagctgaccacctgcttcctcctgaacctccgatgcccggagtagcggtcggccggtccgtcgcgttggttccccctcttcgggagttcggtatcaagggcgtctggcttcggtcgtctgttccgagattgagcgtcgattctcgcccagagacgtccctggtcatcgatcgggaataaagcgagcgacttcgagaggaagtcttgggtaggtccgcgattggcggccaaggctcgatgatgagcaccagatgccgcgaggagatggagaagcctgtgatgacaataacgagtgggttcgttgcactcaatctcgcatgacgcattaggcaaaatcggcttacctgagtagctcagtcgagtgacgggtttgaactcttttccgtcttcttcttcgacgtcttccatcccgaccaacccggtatcttccctggggtcaggggagccttcgcgcctccttccatccgcatggtccgcgaacccgtcttctggatcttcgagaccggttccgagatccgtccgatgaccagcggcagcggcgcccgctctcatagcttcgagctcttcctcggaacgtacgggcagatgcggagccccctcgatcggctcgttgttgattgtctggagaggcatttcgtcatcgtcatccatgggttcttctttgaccgtgatttcctccgtctcgtcgtcttcacgtgcgaacaagggcgtctgatcacgaagaccacttcgttcgtccagctcggcgtcgaggtccccatgttcttccggttcggtgtaagtgaccgagcttcgttcccttgtagatctcctcggggtaccaggctctgcagtctcttgacgtgcctctcgttcttccccgagatcggtgacgacggagctcaacctagacggtccgccgggtctcatcgacccccttcgggtatgttgctgaggaggcacagtcgaggcttctcgtttacgcttgttctggaatttggggacgagcgtggccgatttgatctccctgccggccttgctcgagcggttgagcctttgcatgtggtattcgcgtttctgataggggtgggtcgaggtcgatcagattccaattaggtgtctcgaacccgcggatacgccctaccttgagcaggacgacatgccgcgaatccgtctttctgaagaagaatgcgaattggtagtcgactgcaggtcataagtgagtcgagagcgcgcaagcatggtcgaaccgagatcggcgatactgactgcctcgatgcacgtcgacggtggatttcttgctagggtcttccgagtgaaacttgcttgcgagtctgagcggatgttatatgagcgtcgaaatcagtcgaggtattgggacacgagctcacttgggtcggagatcggccaggaccgcctgtaacgtttggttcgtcatccaatcgacctatgagtaacatgttccatagctccgatgagcactccacaggtcccgaaagaggtataaggatagtctcacatgtcgctcgtccagatagaggtatagcgggactaaccagcgaaaggcaaataagatcaggcaagtccggctcgtctcgggatgaaacgtcatcactccgtcagagggacattacttacggaccgtccacgagctgatcctcaggtagaacgcgttcctggttgagaacggcatgggtcgtctaggtctatgccgaggattgagacctggaacctctaggccagtctgttgattgttttgctgattggccgatttccatgcaaacttgatagagcagtgacgtcgagatcatcctttctggtcagactagctagctagggggagttcacggaaacaaattagcttccggtcgatcagctcacctgcttggattgcttggactatgacagatatggatgcaagaggacaattaccaactctagactctgtcaaacgtcatcacctgcaacaggatcgagatctggagtcctttcaagctagtctatctttgacatcatgtctgcatctgctgtacaagcttccatcaagacggccctcggtgccttgccgtccaagttcagcaaggcccgaagctccggcgccttgtactttttcgatagcgacgtcaagagcgtcgagcaggatggcaacagggtcagtccgacatcgactgtcattgtcagcatctaaattacttacgatagttcacatcagtttcaaatccgagtctgcccagctctgcaggacaaggcaaaggcgaaacgggaagccgacgccaaagtaggcaactcggggcaagctgaacccaaaaagtcgtccccttttgagcccccgtatcaggatgacctgttcgtgggatctctcgagggatctcagggcgaggaagggatggtcatgctcgtgagttgaaggaaggcaggtttgtcgaatatcactgattcatgcctcttgcgcgatcagcttaacaaggcaagacacagtcgaccattctgatttggaatcctgctgactgccgccctatgacacgaatagtacgcagtattacctgaacacctgctactctgcacaacaagtgcgtcgcgctgcacgcatcctatttgatcttcctccttattgacatgtcgatccgctctctcctagcccaacaaccgcaatccagtcctcctacccctcatcaactcctcctcacctacctgactcttcacgccgcatcgaaacactcgacaaacagaaagaggatgctagcgttctacaacgggggagaaggtgccggagctagtcagacgtggagacatttgcaatgcgtcgaggtaccaggggacgagggcgccccgctcgaagagtggattgaagacctcgaggtcgagcgaaaaggtctgtctttgaatccttggtctccacctccctaaagtcctcactgactgacaaaaggagatgacgcgtgcagataaaccgtttgtcaattcgagacttccgcatttgcacctcatgcaccatcttccccctgctcggaacctgccgacgaattggacggacgactcgctcgacaagatggagatgaccttggcgaaagccatggtgacgttgctggacgccatgtacgacgctttgaggaggaatgacgctcgtcgagatggaggttggaaccttcttatgaccctgtgagtccgggcatgcggaggcaaaccaggacgcctcgatctgaccacgaccttgacgtggacgctagtgatcaccttcatctggttcctcgttcgaaacccaactttgaactccctggagggtccaagctggaagtcaattcgctcgcctttgccggtatgctactggttaaatcggaagaagagctcgagcttctcaacaagaccaccgaggccaacgagaacggcggaactcatgggttgatgaaggtcttggagcactgtggtgtgcctcgagcttggggagaatgggaagaggcggccgaggggaccatggccgagcctgttcagcaaaagttgtaaaagtcacgggatgaggcgatacattgaatcggtagccacggagagtcgttcattcgggctctatctaccaccgcgcaatacattttgagcttaacatcatcgcatcacaaacagtggtcgcctttgccaccccctatgatatgatcgtttgtgatagattcgatgatttcgatgctgactaagctgttcatttccggatccgcacgcgaactcaaagtcggcggcggggacgacggtgtccacaggtcgtgcaacctcttcaaaagagcaacaggtcaacagcttgcatcgttcgatcctatcgtttggctcgcacacaccggcttgatttacttctttcatccaactttggggtaggcgatgttgcagccgtttcaaagccgggagcgcacaagctaaccgaacgaccctcacttgacctcctcccctgccagacaattcaacgctgactcttacctgttatccgaggaccgagaacataggcgagaagcatcatggtcagtcgctctctggaactttctgaatcttcggacgggtatgctgacgaacgctcaactggtttacatcagtccaagcatcatcccggtaggcctcctgatacatctccatcatgagactcttcactgatcggcgtattccctttttggcagatcttattatgtgccgaaggcaacctgggatcggtaagtcgctggacaataagtcgggttaccgaacagcagtatctgaacgagcggttgtttatccctgtcactacagctatcggacgaatgtgcgacaagtgtgacgggaaatggtgagtcacggaagatcagcctctcccccagaaaccctgtactgatgacacgttgaggaccgtgtacagccccatctgcgattcttacgtccgaccgatgacgctcgtacggatatgtgacgactgcagttgtgagcacaatctccctgtctttccctaattccaccactcgaactgatcaccgtctgcccccccgggttccgtgctctctcgtagtcggatcgtacgccggtcgatgtatcgtctgcggttcccacggaatctcgaacgcctactattgtacaggtgagagacccccctatcctccctccgtcgccttcatgcgactcgtgcgggaacacacgcgcaccgcatcgcatcgcatgattgctaaaccctcccccatccggttcgtgaacagaatgtacgaggctcgagaaggatcgggatggatgtccaaagattgtcaacctgggtgcgagtcgtacggatgcgcattatgagcgacaaaagctcgggtaaggatctggcagtgatgtcgatgtcaccggtgtcaaaggcaatcgacgctgaagtgcatcccttggtttttgcaatcgcaggttcaaaaagggttagacggacgtgtggatctcatgcatgtctgggtgccttagaccaagttgtccggcttttatgaccgattcctcaccatgtacaaagattttacgttttgtctcctacatgctacatgactagagctagctacaagtctaggtgctagtttgtgcagcttcggtggtggtcgacctctgcttcgcttgaatccgcgtcgccccccctcccgcgccctgaattgacaaagttaccccggcagccgccgccgcgatggatcaggtcgatcgcgatgagcgatcgtcggtgaaccaacctccaggagtggccaaagttcaaagcacagcaagttgacacccaagacccgtcacatcgatactcaactccttgaccgtaacaaggccgcgacgatcacctaccaggcttcgaaaccacttctcttctctcggcttcgctatagatcgcatcgttacaaaatgcttcaacgagctatccgagtgagctaccagacgcccgtcatattcgtcactcccgagattcgctgatttccagtcgtgccatcgttctcgccgcatagggctcagcctcaaggtcagctataagcacattacgatgctcatcacgacttcatgccatcgcccggtcgtcggcctctctgaatccatcgacatcgacatcgacatcgagcggcagtcgaccgttctccctgttctcccggtcagcttcctccgagcatacccctacgcaaggcaagctcgccgcgctggagagcgatgcgaacgccagtccagaggatacggacaggcagatcgagctcttcaaggctttattggacggaggagccgagcaaggcgtcatcgcccgatgggaaggagccttgagatccgtgagtcggcgttttatcccacatcagggtgaacggtgcaagaacgacactgatgagctctatccggatgatagactccgcctcaatctctagcccaatccaacgaagcattcgacatctacctgcttgctctcgccaggaccgggcttagcaatcagatcccagaagccgtccgggaacgggacgccatcctagccggtcgaccttcctctaccgccccgcccaccgacgacgctgcggacgctaccaccgcgaccgccccgagcgcaccgacgatgaccccactacaggcgaaattggcttccctacctggattccgaagtcgaatgtccacctcgacatcgacgcccggatcggccatggcgacgacctcgttggcggagctcggtcaacaggctaaacccgtccacgtcgtcctcgaagaatccagagggttctccgcagcacgggtcgccaagacgttgggagtcaatgcgctttacattttttgtgagtcagccccccccccctcctcttcttggtcggatttcgaggttcgatatactgaagcgggatgtcggggtcctcttcgaattcgcccatccgataggtttcttgaccctggcgtcgttgatcctagaaaacaccgggctgctcaaggcgggcaatcagccgaccgagtttgatcctgaaaagggaggtgtcgtgaggttcgaggatgtcttgggatgtgacgaggcgaaagatgtgagtcgtccaaattggcaaggcaaggtccgagcgtgtacatctactgatccagcctgcttgctcctcgaataggaagtaagcatgtctcgcacgactcgtatgatttgcgaggcttatactgtgatgcgcacagctacaagaagtggtcgagttcttgcggaatccagagcgattctccaatcttggaggaaagttgcccaaaggtgtcttgctgaccggtcccccgggaaccggtaaaaccaggttggcccgagccgtagcaggagaagccgaggtggtgagtctatccgtcgcggtcgaccgattttagtcgctcgtcccgaatgacgctaacccctcggtaacgccccgcagccgttcttctacgcttcagggtcatccttcgaccaaatgtacgtcggggttggagctgcaagagttcgagagctctttgcggcagcgcggaaaaaggctccggccatcatctttatcgatgagatcgatgctatcggttcgaggcgatcggcaaaggatcaggtgagccaagcattcccggctcgagacagtacctgattgctcagtcccactccttcgttgctagcattacatgaagcaaactctaaaccagctgctagtagagctcgatgggttccaggacgccgagggagtcatcgtgattgggtatgtcgcgggcattgcgtcgttagaggcctcctcacgagctgactcgaccgatggtatatatccagagcgaccaactttcctcagagcttggataatgctctgactcgaccgggacgattcgatcgacacgtcactgtgcccctccccgatatgcgcggcaggaccgccctactcaagcattacatgaacgaggtcgagtttgatgtggatgtcgacccttcaatcatcgctcgtggttgccctgggtgagccgcgtttccaacaacttctctctgacatgttcatcttatcgataatcgtctaccttgtagcatgtccggagccgatctgagtaatctcgtcaatcaggtgggtcattgtcctttatttagaaccagttcctatcaccgatcacggtttcctgtgacataggctgctatccgcgcttctcgagagggctcgactcacgtcaagctgaatgtgagtcatgcatacgcagaagagcggacgatgctgtgctgagataatctgtcaaaatagcatttcgagtgggccaaaggtaagatcggcatggctcgcttgcgatccgaaatcgtccctcatcttactcgcatcatcagaccgaatcttgatgggcgcggagcgacggagtcactatgtgacaccagagaataagaagatgacagcttaccacgaggctggacatgcgttgactgggttgaagacagccggcgcaatgcctctgcacaaagtgtaggtctttttggtcttgctcttcaggctgtaggcaaatgctgacgcgcaccgctacgtgggcagtacgatcatgccgcgaggccgggctttgggtttgacgatgagcttgcccgaggacgatgttgatagcatgacacggaagcagatgaacgcttcgatcgatgttgcattgggtggtcgggcggctgaggagctcatctacgggatcgacgagacgacatcgggctgctcgtctgatctggaaagggctacggatgtggcaacgcggatggttcgagtaagcgacgacagtgatgttcaatacggtcgcgcttgactgaccaagagtgacttgcgcagaattacgggttcagtcccaaggtcggcttggtagctcacagcgatgacgatctaccctacctgagcggggcaaagaaggatgagatcgagtccgagatccgacggttcgtagacgaaggctggggtcgggtcaagggcttgatgcaagacaacatggatgatcttcacaaggtgagtttaggcattcactgatcgtctaaagcgcctctgatcgtgggagctgattgacgatgaatatcgtgctggatttcagctggccgaggcgctagtagaatacgagacgcttgatcgggaagaagtcaagcgagtgctccgaggggagaagcttgaccgccttgacacgcttgggcccaaattgacatcgcaggtggacgagccgatcccggcacagatcatagaatagaggtgtagacgagactgcaatgaagcacatattgccattgtgatgagataataacgatatactcgagaaatgttgccttttcgtgctcattattgtcgatttgttttctcccggccatctcgcgatctgtgaagctactttcttcaggcctcgagcaaaaccaatcaggaatgatacataaggaatgtgcgattatcacttggcagctgcgcatgtcgtctacggacgacatgacggtttatcggtcttcgaaaggctgatggaattccatacattcgcgaacaagccgcaagcccgatgcgctcattccacagatcgcgcagacgcacgtgagacgacttcgtgcgctgtgttgacatgatgcatgaggagcttagtgatctgatgatcatcgcttaggtctctcctgatcctgccgtggcactacaccgccagtgatgtcctcgactggcttgactcaacttgaaacgcgaattctaggtcaattcatgattgattccgttcagcgaagcgaagattggggaaataattgttgttgcttctccgggatcgatcgcagtccaatcatccacgggactagcctacgactcgaagaagctgctgtcatagtccttgatacacatacacttgttactcttcatcgtcaattcgtcaatcgattcgtcctgaccataccacgtcgtccttcattgtttctccatggaatcttggctgcttctgcacgcgagtcgcgtatcaagcgaaacgctcgcggaactcgttacagggtacgcttctcaccagggtccggcccgcatggccgactgaggctgtcagacgctgaattcgacgcatccgttctattctggaacaatacccttcattcgaggcccccgtgcatcccggggccggctcttttccatactgaagaaggattgttgcatcgaaacgacgggttggatcactcatgaggctaaagcggcctactgtctgtcgggttccagcaagatatcgaatgtaacgtgagtcttgcccttaccagagggggagcttgaatttgtatagccatcgatcgagtttgggcatccggtcctctcatcatgaacgctcgaggaaacggcccgtgtcagcaattgcagactcgaaaggacctcttgttcattccaaaggtacgtcttcccttgctttcataccaactctgcagtcagctaataagcgcgatacagaaatggggcgtgtcgacaggtcaaaccgccctaccagtttttagcgtcattatcaacccaatcgcctactttccgcttgggcgttcctttgaggccttggatgtgcgatgtgagagtgtcgtacggctctccaaaggaagattcgggagctgatgcgatccatgttcattctagtttcaccgtcaaatgtcatccgcgcgagcgttccgcagccgatccggtacgccgcctcagtcagtcacgggagaattgtatgcgaattggagtttttcgacgattgtattaatatttcatagccctacatcgtatactcaactgaaacgctggacataatatatgcctcatattgccgcctcttgctgcccgccacatatggctcgagcccccgcggcaaagccgccttcggcgctcgacctactcgcagcatcgtccgcaatgataccgacgacttttccaggactgaagccacgttctcttcaggcgaacgatcaggacctggatcccgataaaactctgtcagtgacggtgcgtccagtatagtgtgtcctttgccatctttccccggatggcgcgacggtcaagatagcccgaacattccgagcaccggaagcaaattcggtccacgtcttgcaatcttgcaaagtcggtggtgggattgaccaaagaggaccgacggacagcattcctctgcttgcattgatcgctgtctgaacttcgggtcaacaggtgaggctgaccgcgggtctcggctgatgccatgaacgctaaccaattcagcaacacgcgacaggcacggggttttcgcctcatcgttaacgagccgtttttatctcttggaacccgatttggatgcgcggctcggatggctctttcgcagccggcggaaaacttcgattgacttgatgcccaacaacaacgatgccgatgcatggttaaggtcggcagctcgctcggacgtcgagccatgaatgtttgagaggatagtcgacccctcgagctcagtcgcaaatggtgcaacttccagtgcgcatcatcgcaatcgatcccgtgcgcaaaacgggggcttcagctgagcctttgccaagcaggaatcgatatcgtagcgtggcttcaaaaacgcgtccgtcggcgaaaatacctctgacgacgctgggacggtggccggcgactacgtgggtgtgtcacgagcgtctcaacgaagtgacatgctctgatcctgatccatcgatttacgacttcgccggcaagcagcgcaagcgaccatctcgcggatcaaagggaacggtggatcttcatccggtatcatccgccctcgcctcgtgtatcgctccattcgtccacctcaaaccacgaatcatgaactcggacctcaaggactactgcatacagaggcaagatcgcaagatcatgacgatgtatgtcctcgttcgcagtcactccaaccactacgaagtcaccggcggtcttggtttgttgatccctggctcatcagcggtcaccacgttcgatcgccgcggcgcaaagaccccggcggttcttacggcatttagtccaaaacacgcttcctttcacgccctgcctggaatagttgatgccaagacatctgtgccaaggatagcactctcgacttggtcgggtggcagctcctcacagcattttctgccttgcaggactgcatatatggccagggtcggcctggttcatgttatgcgctggcgggttgcaacgagtcgttcaacgatagcagttttccggacgttcgaagaacgcaacctttaccatcgaaaccaacctcggccttgtcaatcaaggttcctctaacttgcctccggacccacgcttccgaacatccgcccgacgctttccgcgcgaccatgtccaccaagatgcacaaagggagttcgatgagttttgctgaaatcctggacgaggagttggtgagttgtcgcctaccagaacatgccaaaacttgcacacatactgattgaaccggtccagcccgctccacccccttcgtttgccgacatcatgaagtcattcgctaaagacggcaatggcgatgcaaagaccctgttggctattctgagcgcaaagcaggccgaagaagacgtaagcccgcagatgttttcgccgcatcgttgacggtgacatatcaagtctgactctcggtacattttgttctgctactagcgtctagcaaggaccttggagatccgcatccatctgcttcagatgcacgcccatcgcctcgggatggtagccaaaccgccttcgcctcgatctcagggctacctcactcctcctcatatcccatcacacaaacttcaaggacctccctcgtcacccccttactctgtaccctccgctcgggaggctgccaacattcaaaggcacaacagcatctcctcttcgggttccggttcgagggtcgagcactcggccgctgtgtcatcgccggctttcctcaccctggcccctatcagcaaccagtccgagcaagacatgagccagctccgacttgctaccatctcgcccaaggcatatcccacctacatgaaagccagccctaccttcacccccctcagcttgaagcgtcgattgtctgacgcccgggacgaggaggaggacgaggagacctcccagcgtcgcaagcgggtccggtcgaccaccttgtccgaagtcgaagccgccaccgaatatgctgttaggaaatcgtcaatctcttcgtcggccagtaggaggagcaggagcttgagcggcggtcgaatgaccaatggcttggagatgttgctcaacgcagccgagctggagaagaagtgacggccaccatacgtggtcttccgcatgtgtttctgattccgggctttcggttctgcttttttacgacccctttaatgaccaaaacatccctgcgtcgaacattgtataccatactcgagccacgagaagctcgcgtggtcaatcaccaagataccccagttgtacatgctcgccttatgcactatactctgatctttcactacactgtcaagggaccccttcgatttgctgtccccgtctggccttgaccttgaatgtcccgccagttctgttatatcttgcaggtgatcaatttcaatacagacatctgatgtcaaagcagtagcactgacatgttatgacgggctgactgtcctgcggcaaattgaacaggacctcactagttccatgaacccacggcccgagtcttgacgataaatcagaatcacagacgggacgaccgatcgttgcaccgcgtcgacaaaatcaacaacgggcaacgggttggtcgctcgcccgggacgtcgaaagagagaagccggcgatccaaatggatcgcttctttccatgtttatgtatcgtatgcagacaagaagacgtcgaagtagagaacgtctctcacgtcaacaaaccgaagacgaagacggtcaggtctgtctgaacgagggatgataggctagagactttcccgtttgggagaggatggccagaatccggaccccttgatcgcgggtttagcgtttcatctgatcgggtgtgtcgtcctcatcagacgacaacggtactaaaggaccctcaaaagcaacgacacggtgatataagccaaccgagggcggatcgatcaaaaacaagaaaacgaggacgacgacaggtcgtggtgtctccgaaccgccctggttctccatactcgataaatcgatcaacaactccttgttgtcatctcgatcattgccatcgaagcggcatcgacaacctacatagataaaggccacggatcgccggccataatggcacaatcaagccgtcgccactcggtggcacccgtcacgacttcgccgagccgtatcccaacatcacccggctcgtcctcatcagggattcccaccaggctcgctcatcgatcaagcatcagcatgttgtccaacaggtactcgatgcagtctccgggagtaacatcttctggagctgtggatagcatgcgaccgaccttgtccctggagacggtcaaacggccagcttccacgcctcttcgaagagcgccttcgcgagaactgctgaagaagccagacagcgagacggcaaacgtccaggtcggtgagtgtcgggagattttcagaacacctttgctatggcgatttcaactaagatgctgttacatcgtgtaaagtcctgcgaattcgaccttcgtatcaaccggatcaaaatattcccgctcgtttcacccggaccgtcctccacccgtctcccaataaccctaccaacgaggtcctcatcaacctgtcaaacgatcccgccaagccggtctcatccgcaccagcagctgggaacaagggcaaagaaacgagtttccggtatgaccgagtcttaggggaagacagcttacagagcgaggtttacgagagcgctggaaagctggcggtggacaagttcatctcgggattgaacgtcacggttctagcgtgagcactctgtcggccaaaatatatcttgacgagatcgaagaggctcaactcgccatcgttacgtaggtacggacaaacgtcttcagggaaatcctatactatgggaacgaccgggatcgacgatgattatcgtccttctgacgaggtcgagctcgatgcgaatgaccgcacgggtatgatcccgagagcgatgagcgagattttcagacgggccgaagctaagcggaaagattctggagccggagcgagttgggagtctcgattgagtttcctcgagctatacaacgaggtcagtcgaaatcgatgccgcgggtccttgtgtcagacactgatgcccgataattcttctgccattaggaactgatcgacctcttgtcaaaattgcctcaagctcaatctccgccgatcgtcatccgcgaagacaagggtcggatcctttggtccggtcttaaagaggtctctgtgaccacgactgccgaggttatgaagtaccttcgcgaagggtccaccaaacggaggactggcgagacaggcatgaacaaggaatccagtcgatctcacgctatcttcagtttgacgttagtacaaacacgaaagtcaggcggaggaaacggcgctataggaggtaaaggacggcctctgtccacgcccaacggtccccctaactcaatccgctcaccgacgccctcggggatccgtacacctaatcgaacctcgatgtttgcgggtagaggcttgaatgggccttcatccggacgcatcacgccgaacacgtcgcaaaatgatgaggaggcttcttggatcgagactagcagcaaattccatttcgtcgatctagccgggagtgagcgactcaagcgtactggcgctggtggggaccgtatgaaggaaggaatctcgattaacgcaggcttgttggctcttgggaacgtcatttccgccctggccgatccaaacaagaacaagacgatgcacattccctaccgagactcgaagctgacgagattgctgcaagattctctgggtgggaacgcgttcaccgtcatgatcgcttgtgtttcgccagtcgagttcaacctcggcgagacgctgaacacgctcaagtatggagcgcgagcgaggaacatcaagaatcgggctgaagtcaacgaggtcgaagttgggtgggatgatgtggagcacctacaaggcgctgtgttgaagctgagggccgaagtcgctagactcaaggccatgtcagaatctagcgagagaagcgggacgccgattgtcgtgcctgaagacgtcgaggccgaaatgagggaaagtacagcgagactacaagagctacaagccgagcacgatatagtatgtgaaaccagttcagctcgaaccctggatcgatgcgcaagtttcggttgactgtttctataatacagatgagggatgatcttcaagccaagtctatccagattgcgagattggtcaccgatctggaagctgccaagcaatctggcagcttcaatcccgatgacgtgagcgccttctccaagctcgtggaaccgatcgtggaagagtacgagcgcttgatacaagccctcgagggtaaattacaagcgacactggcgtctttggtgagcagaggaaagaccagcccaacggtataatccgctcatgcccagtattgcgtgcaccaggaattgagcgaggagcgagctatcgaggcggaagagatcgctgctcagcgtgagcaccgcatgtcccgacaggatacgtacgttgcagatctagtcagcaggctcaatcgtctcaaggacaaggagagaacttttgatgtaagggttgaggccatctgcaaccggctcaggagctgactttcagcgctttgcaggactatatcggcgacctcgaagaaaagctcaagtctttcgaagatgtggactcagtgcaccagaggaccgtctcggaacttcgggccgagctgctggaggagcggaaacagtccaagaatgcagcagagtatattgcgactatggagactgccatgatgcaatctgaagcagatctaaaggaattttctcgcaaagtagaacgcctcgaagcggaactcaagcggaaagaggacagccatcaagagcttcaggagcgcatcaaacttgttgatactacaaaggacaatcagttgctgcttaaagagctagaagagaaaaatgtgaaattagcgaatctcgagcgcgagcttgaagagagtgtattcgtcaagcgaactcttggagaagagagggacacgttgcgccagcaaacggccgaacagatgcagcaattggccgttctacaagctcgtatcgagcaagagtcaatagcgaagtcggatggccagagtcgcatctctgagaagtcccaacggcccctctcggtcgtccaaatgggcgatgaccttgaggacgactcccctgagaaagttccaggctctcccacgacaccggtgacagtccagcacgcctctggtgttagaccgtccgacttggttaccatggcgcccgaagtcatggagttgcaagaaaaacacgctttaacgctcgcagaactcgctgcgatcagcgatcgctacaaggaagccttggagaaaatcaccgagctcaccggacaagtagtcgatgcggaggaggccaatcgggcatccccagctagggatagagactcgccagagtcaccgaccaccatgtctcgcacagccagtgcgactagcattgcttcagctgtttcagcagcctctgaccgatcaagacgcacaaaatcggtgggcaacgagttggttggcaaagccgacagatcggattttcatcgcgggaggggcgatcgtatgggggacataaggtcagaatcgtagaacgtgagatactgcagcactatgctgaattccatcaccttggggaagcaggccagtgtcattgtcgcaggagctatcgttatcgcgattgtcgcgatcctccttcggcagtggtaccagcctcttgtcacctcttggcaatagtcgccagaacctgccatctcgctcgagcgcatcccttgaagctgaaatcaaacagctacaggaaatactgcgacgtcgagacgacgagatcagggttctggaaaacgctatgcgatcaatttccggcacctctcctcgctttgaaaacgccggctataacaacatgtatcataattctcctgaaggtccggacctcgtccgtggagtatcatcgtcgagctcgatggtctcccacgaaagcctgcccctaactcctaacgaacaacatggcgtcgatccactattgacgctcacgacgactcgacatttcacgatattgaaaggacagacaaagggtgatgcaaatcacgctgaagctggtgaaatcgaccgcattgatcggctcgacacactaatgcggcaagtcccgcggccaaccaaaataatcttgttgtcttcccgctgatagcggattctcgatcattctagatccatggcgagaaaagaaatcgagcacaaacaagaggtcgaggacctcaaacaccgtctcaaggctagcattcaggaaaaaaatacgctcaaggacactcgggaggtatgccgacgtggaggcacgacgaagcacagatgctcggctgatacataatctttccgggcagaaacagtcgtcagcaccggtctcaatcgaggttgactccgtcggtcaggcttcatctaccgcaatatcagacgatgcgcgtcgtcacgcaattgcgttcaggacaggctctcgtaccagtgcggagaccgttcccgccgtctcacaggatgatgccgtcaatgtcaaggagcttcagcaatcgcttacgggattccaaacggcagtcagcgatctcatccttgactacagcttggcggaatccgacgatgctgaaattgaccctatcagcggaatcaatcgcattgctacagcattggcacatgccgacgcaacggaaattagtcttcgagccgaactctcacagcttcgagcgcaaaccagtgaattggccgatgtcaagctgtcacttgacgccgcagctcaggagaagtctgctcgagatgctgtcatcagagatctggaaaggaagctgcaagagttcgataccatgagtcgtcggcaaagcgagactagtgaatctgacagagaaatgccttcgccttcggggccggggctgcgtatgtctttcggccgagccgccactccgacctccaagattcctccgatccagccgcctccgaacattcctcctcctccgctaccccctctgccagaagggcttcccacggttcaaaggcacaattctcctggcaatgatctccagggtacagcagaacagaaaggtcaagcaccgaccccgacatctcccatcgaagcggcgaagctgaaggttgaggaagacaatcaagtccttcgccgtcaaatcgcggagcatgaacagacgattgccgagctgaatgcaaagatcaagacgagtcattatggcctcgaagaggtgatttcgatcgcgatcgattgcactcgctctatcaactgacttgcatgatgctggctgtagaatatggctatcatcaaatccctcactgacaatcttcaaggcagcgagcgcaaccgtgagtgagattccgcctcagattgttcgtccagtctaaaacatgtaccatttaccttggcagttcgcaagctaaggctgcaggcgcaggagcacacgcgcgagcgtgacttggctgattctgaggtgcagaggttgcagcaagagctcgacgtggctcggaaggaggtcacgagcgtgagggactcgatcatcatcgcaaagcgttctctcgaagacagattgtcagaggagcgcaaagcgaaggagcggactcgacgacagctcgaggaaaggctcgaggcggttcaagctaagcagtcgaagttcagagtaggttcctaggtcgcggttcctctgctagaatgcctcgctgattaacacgctcgcagtgtttctaaagcacgtattggattagtcatagaagcatatctgcagttattcgagagtcgttctccttgtgcccatagtgccatctagcatgtatagctaccagatgctttccgctttggtcacccttgggtctgtcagtaccgcggggtggggtgcgccttatcggccgaccggaggcattttctcgcatatggctccggtatgagcattccagtgcacggcgtcaagctctcttctagcttctggtattgatcgtgggcacatctgtttgcatctcgatcagagtcccaataggcttgcgacacgttcatctagatcgatttctgcgtataagcatctcttggagtatgctagcaagttgttgcggtccaagagtcagagcatcttacggagacctgaagtcgggacgcgggatggacgaactttcggtaaagctccgagacgggcagcctggcacattgcgatgtgataccaaagtggtcgaactccttggaagtaggtttcgctcctcctatctgtggatccgattccgtagctgattgtcgcggcgtagggggaaagacagtcgtttcgaccgaggtcaacaagttgctcgacgtcgctttgacggaaaatactgggctagcaggagaatcgacgagcgatctcgccctccggatatctttcttggtgaaagagacgccccatcacagactggataacagggagttgaccatctcccgcgatgaccgggaggaagcagaaaagtggatcaagacggcgttggatcgggcatactcaggtcagcttcggcgtttctgcgtttgagaagagactcgactgacggacttggacgccaggcgtttcgaaatcgagaagggtacggcttttagtgaatccgattggaggcaagggaaacgccatgagtcttgtcacttcgttagccctgcctgtctacaaagcggctggctgtgaagtggatcttataggtaagcaggtcgtgtgcttgagccatagagccagttcctaatcgtatcatctcacagaaacacgatatggaaagcacgcagaagagatagcacgggatatgaatttggactgcgagtgagctggacccctttcatgtgcgtcggataacctctaacatttatccgggtcttagtgttttggcagcagcctcgggcgacgggatcattcatgaattgatcaacggactggctttgcgacccgacgcggaagaggcactcaagatccctgttgtccccatccccacaggtatgttcttctggtggcgagatgaatcgtattttgttatgcaaagctcaagggagattttgcacaggatcggccaatggaatgtcaatcaatctactgggtctggaggaaggattcgatatccccctagccgtactgaataccatcaagggtgagtcgcagcgtgcgaatcataggagactctccatcgaaccgaattcatatttcaggtcagatcatgcccgtcgatatatgctcggtgacgcaaggcgatacgagaaggttttctttcatgagcgtagcaatgggtttgatgtgcgagatagatctaggtgggttgacctggccaatttaacagtgaagcaataccaatacaattgtctgatgttcgacaggaactgagcacctgcggtggctgggagataaccgtttcgtttacggtttcattaaaggaagtgagttcaaggcgacggtcttcctgcacagacgtcagtgcccatactgatgcgtgacatttgcatcgaagtcattttcaactcatctatgcgctgcaagatccatatcaaggtcgagaccgccgacaagggattaatgattcaacgtctcaatgagtcccgtcaggcgcatgtcgaacgaaacagccatctcgatcgaagtgaaccacgagaaccgccggtaacggttgaacacttgccgagcccctcgatccctcctgtgcgagcgctcgagccggatgaaacctggataacattggagagcggcaaccaatacgccaaggcggaaaagaaagatggtcccagccccagatggtcctcaaacggctcatgggcaccgggtgaagggatgctttatgtatagtaagcctctttgcgtcgttcatcgtggaattccgctgaccaagctctgacggacagtaccggacttcaaccatatgtgtcccgcgatctcatgcaattcccggtttgcattcccggcgagggcctgatggacgttgtcgtccagtctctggtacgtgtagtcgcaattgccaggtcgactcattcgtactgatgattggaacccctcgcaggtacctcgctcagtgttggctcagtcgatttctggaggagcagaagggaagcagttctacttggattccgtgagttacgctccatacgttccttgttgcgctgtctataatcccgcatcttcttgcctttgcagcaacattactataaaggtgagcgtgggtttgaatacgaagggttgtacacgccactgatcactctcgcacgctgttatcgtgactcagcctcggcgtatgtcgtcgaacttgaaggaaagaacggtttggtctctgtcggtatgtcaactgcctggtacccatgagttctttcttctgaccgccggtaatgatgctgtagatggtgaagcgatgcaggtgaccaggctgtcggtcgaacttctgcccaagatggcgcgaacacttagtctctacggtacctgggcgcagtcgacctttggtaaagcagaggcagctgcagtgacgacgagaccctagtctctcgaatactcgttacggacctcacgaatcattcacgatagaaccagtatgctcgcgatttgtatgatgacccttgaagcactcgacgtggcgtttgtctaacgaaaccttccagttcgaatttcgtcccggaagcgcctcggccaggccgaccctgagatgacgtcgagtcgttgcagccgaagtggagacggctgccgtacgggcgacggacggatccacgatcgttggcgatcacttcgagacagatgacctgaatttgattcccacttgacttttgtgtataacgtggccgttctaagtcctggtagcattttgaccaaggttcaggatggcagttatgacgccaaaatgagccaatctggaaacgaacctcatcccaaatcagaccgtccgacaatctctgcgctcttacaagaagcccttgatacccctctggagcgactcaaccttgtggatactcctacggcactgccttcgcatcttcgggaggctcctgctgcacctcccgcagctcacatagatcagtcccagcatccgcatcatcacgtacaacctgagcatatcacgtctcctatccgactcactgcagagccagaacttattgaaccagacggcatgccaatcatcagacccggccgttcagggtctggcctaacaggactcttgaacacgagcagacagacagctgggaaatctacatcttcgtcgactgctgttgctgggccatcgtcatcatcgctacatgacgaccagtccctcagcccaaagaggcggggcaagcttcctctgcagccttccacgaggagaccctcggatgcccaggagatgcgagacgagatcaacagtctgcgccgtcgatctggagtatctcaggatcatcaggtcgacatgactatcgagggatcttcgaaacgcaagtcgctcgacggtgtccggataggcgggaaatctttctcctctctcgttgcaagtaaccccttccagcaagacagcgatccgtacaaatctcttatatcccatgatccgtttcagaaggagcctcggtcggaaatacaaccaaggcccaggcctcgaatgcggcatcgatccagctcgacatcgactttggagaccgctcccaggcatttgcaaaggaccatatcgtccctcatcaatcagaaggacgggtcagctggaggtacgacccagtatccgcctgatcgcggcggcatgtcttcgtccctgccgcgatcggcgtcgtttgcttcgctggcctttccaagccatttgtcgttaccgaagacgaaacttcccactttcccctccttccccaacgttccgatgacggcaatcggcagtattagaggattctcggcgagctccaaggacgacaagtcgttatggaagacgtggtgggaagggtccggggcgacagctgaagagatgaagaaggacgaaaaggcgcgggagcacgcgcacaagcacatgctggacgatgctgacaagggggagacgatcgaagaggagagtcggcacatcaaacagaagtgtaagattgatgacccggtggatgatgtgatattgtggatgctgagaccgaccctccacttacggccttcccagacgacacgccgaagaatcctatcgtcttctgccatggactgctaggattcgattatattggtcagtcttcctgaccgatttcgctagtggatgagactgacgatagtggagcttccttcttcaggtccaaaggggcttcctgcgtaagcgttcctcgataggcttcacttgcaggtcagcgctgatgaatagcacagactgcaaatctctcattggagaggaatatgcaatgtgctacaagagaatggagtcgagttgatgatcgccaaggtgccggcgacttcttctgcggctcaacgagccgagatcctgctcgctgccattgaggagacgttcccaggacgagaggtcaatcttgtggggcacagcatggtacgtactcgttgaggtagttcctgtcattcgctcgtgctgatcggcggcgatggtgtatctacagggcggattggacgggcggtacctcatatccaagttgaggccgacgacgttcaaggtgatcagcctgacgaccattgcgacgccgcatcgtggatcaccattcgccgattatttcatcgagaacatcatcggtcgtgagtgactgtagtagcacgcgagctgctcccatctgacatccatgcgaggagactgttataggcgaacgactaccttcctggctcactgtgctcgacactgtctcgttcggcgctgcaggcgatggtagcgcctttcaagcgctgaccacccgctcgatggcgcttttcaacgagcaggtgccggacgacccaaatgtcaagtactactcgtggggcgcgtcttatcagcccggatggtttgatcctctcaggtggagtcacgacagtatcaaggcggtcgagggggacaatgacggtctggtcagtgtcgaaagtagcaaatggggggaattcaggggagtcttgttaggctgcagccatgtggacctgtgagtcgttgttcgagagtgcagttggcaagaatcgaacgtctcatcgactcctctttatcagcgttggatgggtcaaccatgtaaggtttactatggaagcctgggccggtcgaccgatcgccttcaagccggccacgttttacctggagatcgtgagtgcacgcgatgcgaccgtttcatttgctcttgccgcgagactcaccgctggattctacaggcggatcaccttgcgaaacaaggcttctgaggagtgagccgtgatcggtgccggacatcagacgggacgcggaaacaaagtgtagacagtcttttttgtacacgcgcgctctttccgaggtgttgtcggcgaccagtgacagcgcacgcattcgaggtgttggttatctcgatagatcgcaaggatacgatggatgagacgcttgttgatctgcttcttgccgcactcgaggggttctatcgtgaggtcgaatagcactccttgctctgtgcggaccgaggtgcatatgatgatgattgtgcaaaccaaccggttatttaacggcgaggtgggttgattcagttgaaggaacccggtcttttcgtgggaaagacagagcgagcgcgcgcgcgtgattgttgaaggcgtggctgtctcctcctcctccagccctggctgccacgctcctcctccacccgcctttccccttccccctgctgcctgcctctctctctctccctttccttttcctccccccccccctcccttcacacggtacataatcgctgaattggtcttttgaatagaagcgttgtcgtaatatcattcaactgcatggcggcaaatgatgctcattcatgattttgtgagagtgtgtgctcaagtgtatttgcgaagaacaaagtcttgacttcctgaattacaaaaaggtcagaagaggccaattgagattgtcacccagctattacacagcagactgccaggcttgtccaggcagtgttgtctaaaaaataattgattggcttggtcatgcttccagtaaagcaatcaacgatccaacagcctgcactcccttgtggcatcagtgttgtctgactggtgacctctttgatagcaaaaatatgtataccaggttcaagacaccgctaaggaagatgatacaagtatcaggattaggcctcaaataactcctgcatactccatgcgggccttaggtctactacttaggattgtgtaacggatgcaccactagttcttctacatcagtctacactatgggatatgcctctctaatgttctatgggcctggtacaaggacctctccgagggatcgtccttggaatccgtcccgtgaccccactggggagtataccaaggtgacgtctgccgtggtatattgtgttaggtatctgtggatacaaccgattgacctgaacgggaacaacaaggtgctacaagggactgaggtcccagactaatcccaagcctaaccatataggtctgccagctagacagtgtgtgtcgtaccccaattactctacagctgcaggttggtaagctgctgccacaggttgtggatgacctttaccaataacacatttctcttgtgcagaccgttatgactctatttgttgtcctcttgtatcttatcatcctggattctatcccttgcggcccaataccctctgaccctgacgtgactctttcaagccaattgaacctcaatgggccggcaacaggtgctggcgcaggcaaaggtgcgggagtaggatttggattggcccaggccccattcatccataggtccacatctggcatgatggggaatgacagagggcagaggggtccagtagtaaggttgtccagtaggggatttggacagtacactgagcaagaggctcaatggcggccgtggcggggagggtcctagaactgttgttctgggcctggcgtctagacttatcggtgtcggcaacctcctgttcaaagacgaccttgcccttccttctgcaagacctgcaactttgggtcgtcttcctttccggcatggtggttcccctcattccagggtacgatgcggacgtctcctagggccaagaggttccacaaatatccaagtccaggctacgttgcagctgcaggacgtggatatccaagctggcctcatattccaagcccgcaaaatggaaagtcgtagcttttgtgtggttgtattgaacgatacgagtgaacttgacatcgttaggctgtaggtgcacacaatatacactttggtgtgttacttctttccaggattggtttacaaatttggtaccgcttctttagttccttacttgacaccttgtcactctatgtcaacagtgcagcccacagggcacactccacagagcaatctttgtaccaagttgacttgtccttatttgcctccctgtcatcagcttgtcactggaggtctagccgcgaattggaaaagagaaggtagttacgcgttcgtacgtaattggggggttcagtagtaatactaggctagacgttggggagggtgacctaagctcttgtaaggtagtggtaaagaagagatgaaatatcgacgcttgagctcctaaaccccgctcaagcgtcttcaacgctaccaaaatacaaagcagacgtctctttaggtacgaaatagtacgagaacttcaagaactgtacgtgtcgcctccgcgcgggacgtatcagacataagccatccgcgccgctgtgacacagctttgcctcttgttttgacccaagcgcaatgtaccaaccagcatgtatctcgggatgaactggctgtgctacctcgatgtgcaacgacatggctattgtagtagagataagatcttcacagctgtcactttgatgagcaactgctctttggacaaactcactggtgtattctgcaaggcaatcatttagaggacccttttgccgacatcgaagatattttctgcctgatcaagtatcagtcagcacatacaacacttatgggtaatctgttctgcctctggaatatagtattaaaggaatatgggtttggcatgtttgtacaagtcttttattggctattggtccaattgcccccatacactgtgcaccacattgtatgattcccgtgaaatgcatttttgcaattcttggcatttttctgagcaatatgccataaacatgaactgtgttttcatgacaagaaaaccttatcaattgctttgcataaggccgcttcagcgactgtcctgaacgtgtgtgtaggagtgatgtttgaggatctttggacacagtgtagcccccaagcatcggcttcccaatttttgagatatggacacagatgccaaggcgaattaagtgtcactggcctgactgtagctgcaaccacgccacaagttccctgttggatctatctgtcttcagtgggcatctgcaacagtaactgtccgtaatttcttacttcactttgagctatgggctcagtcacagacgacatacacatcgaaatcttctgccctgcaacgtgcctcaataactattcccccgagatcgatatgacagaccaaaagcatatttttcacttgcagcagaggtcaaagccgtatcaatgtctctaagagaggcgagtatctcatgattcccttgagacatcgccgccgaaagctttgtcaatgtagccaatgacagatcatttgcgttgtaatcagccacaggagtcatgattacagctcatgtcatcttgcaattctgatgcaacactcaagggattttgtattggaagacagctgcactactgagaattgtgtgattcaactcttctaatgtagttgtgtgtgattctgtcctgctctgcgagattgtagaggacgagcaatgttaaaggcctgttgtagtctttacagataattttcttgttgtacgaccatagaattacctgttactgtaatgtgaagctctttcagcagaccaagcagcgacatcaagacaatatgtatcttgattggagtggaatcctggactgtctctagtgacaggtgaggtggcatgtacttgacatctgacttgatgaaaattcatcaggatgattcattgtgatgttttcaaggaagtctgataatcgattcctaaactgactgaaccatctgacagcaaatgctgtgttccgcctatacgttgggcttactcaacattttcctcgttaaggatgtgacttctaccagtacagtttccttgataaagtaggtgatatgttgcatttgatagctgtacttggatcatctagaagtacagatcaatccaaaatctagctgaattgtgcacatactatcacttgacgcgcataataattcttgcacctgcacatcattcgactcgttttcattcgatagcgctacatctaccgacatcaattgttgctagcgattcgctagtagcatcaggtgagcctatacttgtacttctatggctgggagacaccgtagtgatttgctcatttcatcattcagcatacgctcttgcactgcgcgacacttttctgcaagcaactcatacactactcattctgcactaagtcaatcccagcccataggatcagacccacaagataattgaatgctgatgttgtatgggatcgtttcgcagctttctctacgacattcgaatttgtccaaattcgacgttacaagtggacggagccggactcttgcagcgtgggagccaggttgttcacaaccaagtcgtgcacgcccgcaatcacccgaaacctgtcatgtgatacatcgatgcaggtcacttgcaagcaatccatgtaaagccgctttgaggcacccttactgctccatgaccagatccagatacagacgacgtttcctctttctcttgacttttggtggtcgctctcgctcccaaaactgggttgaactccaatgcaaaacacgatcttttttgcaataggacagctggcgaattgcggaggtgacggccgtatgggacatgtgtccacccctcatagccgcagcaaggctgctgacttgcaagtctagcctccagcctccaggttcgatgcaaatgtttcaacataccatacatccttccatatcaagttgatcttacgccatcaatgagcaatcaattatcttgtcttgtcttgcttatagcatgccaaaagcttgcctttgtgatagacctgtagagaatcctgcaaggttggctccacaaagtctgtcctcagcccatcctcagcaagcttccacatctcaaatagtcgaacaagagcgaggggcaatgatatccatttctgcgaactgttgcaaatcatgcggagctgtaaagcttccgtgtgtcgggaatgagaacaccacaatatattcacgtaagcagattcgtggaacatgctagaagagccattgttaccagtgggcggtcgatatgggagattgttaccgctaaggttgtaaacagcagaacctcctcagatgcgcatcctgttatgcgctgttgtcagtgtccggggaatatagcaaatgaaaatccgtttgtttggtatcctattgcactacaaatccattatcactggtttacaacgtcccctaccctttgccctctcccgcttacttcttcaatgaagccttgcaaggaaaccttgtaatggaaccctccaacctaacagaaactcataggcccatcatgtcaagaccctggtgaatttagtggttctttgcaacacttcaaactatggaaaagaaaactctgccttgtccatctattgaaacttccgttcctgttctatgaagtgttccattatcggttactgtttcttggagttctcacaacagacctcaaatagatatgggcatagcaagcaccacacattcattggcatattcaactttgttctagattttgctttccaagaacttgttagacccacatcagtgttacacgatagccaagggatctgatttacaaggtatgaagcttctacttcttagctatggctcatagtctgatctcaagcaatccttgcaagaatttctgacatagccatttttagcagactagtcccacgaagtatatcaggttgccatccaataaattgtcaccatctgttacgggccatcggcaagcgggtctccagtacagtacgtaatgacatgtaataaagctaatcgggtacacaggtctcaatgacgtgttgggtgcagatgtatatgttggtgaagacgcgcgagaaggcagtaaggattcaacacacataatggggcggcatgtatgttatacttggcgcagtattgtgcagtactatgcgctcgcctgcttccttgtcaatgattgtttgtaacctctcctaatacatctcttgaagtaaacgacaaggtaggcgtatgttgggtgtgatcactgcgcttgaatcatttagagttgtaaggttgtttgtactctagctgatttgcgcgcctctatatacttctatgctctgtcacaccgtgccgcagcgttccgtgcaataccgctgttgcgcagcggcccatgaattccgctacagcccgcgcccagcccaattgactccggtggacccggcatagctttgatgccgttaccgtgccattacgtgcgttcttgacaataaagttcaaagtcgctctgtggcatattgttaggctgccagcagcgcaggttcttctctggaacttgtaatggccgcttgtatataaatgagtgtgtttatggatgaagtacatgatacaagaggtatgactagctgtgtctaaagtatataataatactacaatatacccattcaagagaggtccctgtggctgggcttatacatgtatatgtacgggcgattggtgtatacgcgaaccgcagatggctattacaggtattacagggcaatatcaggcgttaaccaacaatgggcatgaaacggcatggtgacggtaccagacccaggctggggggaccagacagatagccggccagccacaggctgttatggaaccatgcaagcatacggattggtgcggaaagatactacatattgcagaacagataggggggcgcgactcatctagagtacaggaacaacttgtctctcaagatgcttcaagcgtagtcatcacatccagcatacactctgccttgaatcgataggcaaaagtgggatgcaagaaggcatcgggtcaaacacaggtcttaacaagacatcttccaggttgtcacctctttaccacacatcttacctttcttctagcgtaaatggaatgaaattaggaactagacctctcaagatacaccattttggccagtgtaaatgataaaattccactaatatcgatgtgtccatgacaatagcaagggtcgatggcaacagacaaaagaacttgactgatgaatctggatttgccttgagctatttgattatgttggggtggaaggttccactggaggagtaagtggaagagaggcaaaggtatgagtcattgtgcttaagcaatcaaggcacccgtaatacgacaggacaccagcaaacacactttcacttgggatatcgcctgggcgttggtgtttggacatcatgggttgcactcctgggaattccgttgggtatggtctgagcggtaacagagtcattatgattttcaagctttgctgtagcaacagatacgtttggctggcccaggatttggctgttcgtaaatgagttattgttgagtcctcatcttcatcaagatattgcttgtctaggtcctgtcctacgatgtaacctctcccaatttgtgcgtgctgttgatttcccgtcctgggtgacacatgtcccaaattttggctaaggtgaaccaattttgtctctgacgtgttacgctatcgaatgattgttgtgttatctgagagaccttaaggtctttcttccattagacataacctttcctctctgatgcgttaatgacctttctgatggtgtgctgaggtgaaacaaaaaccatcaccattccgtcaggacgatggttctgggattacagcctgtagttgccctggattcagagaactcttcagaccttctaatcttgtaagatttagtgtagtgtagcacatgtatcagtagtactggttcgcctgcctgaagcaatatccctgtgctcgtctttcctccgacaaaccactgtttaactgtgatgtggggagaaattgcaagatcccgcaacagtgtctggcagaaacgatgcaccaattccgctactacagtcgtcctgctaggtctagggtacaggctggttgggaaactgccgctcaattcgtagtcggtagtctattttgccaattccgacgatgcgctacgggcgggaccgaacctctcttgatctcggagccggcaacgaccctcacgttcatgattgcgtaaccgagtagctcgagcagacttggggcttcgaggctttccccagtgtaggtcgaaagcacactcccgcaagtaccgtcattgcacaatcgcaccgtcaatggcgagactgcgccaagacgattagatggttgcgagtaaacttttgcatattcttgacccagatgtcgtctacaatgctacatttttttgtcgacataattccaatttgaagttgaagtatgtatctcatgtacgccatggtgtctcaccaccatttctccaagtccaacgaggtgaaaagcccaaatcgcgtctcgccttggcacaactgagcaatgtctcataaccctcgaattggccgtctgggtcgctttctttgactttcgataaatcgaaggggacgtcggcgaattgctctttgctgaggatctcactcctagtttcgaaacatgtatcagcgttggcgataatgtatacctggtgtcccgtaatttgagcttccaagcctttgcgaactgcctgcgcgccgtcgcgagcgtcctgggaaggctgtcgagtcaatcgcagcgaatacctcctccctaagtcttatgactcacgatatagccaaaagcgttccaacgacgaccggcgtgatcacgctggaattcttctgtgttccagaccttgtattctgataccggacgtccttgattagttactggccgactagggctgatggatggtcctcactactcacgttcaacatcaatcacgttggagaatcggtaactcagtatcttcatgtccggtacccatcgaacgtattggtctgctatagtctctccaaccagtttcgagagcgagtaagcagactgaggtgaagaaatagttccatcgaaatttggccgtcgtaagagacagtaaggtatgttaggattacagcgatatcgcaattcgagcgagacctcacctcaggccgtggtccctgtgattcttctgtcactggcagtgtctctggaaggagaggatccttcgtcgtaatcccaaggacggtatgcttcagatggtcgagcgagtccatggaatatgcgtgccaagactggactcaccatgggaagacccagcaccgtctcactgctcgccgagataatgttcttgattttgagcttcctagcggcctcgaagatattgtacgtcgagataacattgttttgaaatgccacttgatccgggactcggccgggagcaggtacagccgcaaggtgtacaatggacagctcggaaccgtcgaacgtgtacctgttaatttcgtcccagtgactgatgagccagggtatgctggggcgatccaaggggatctcgcgtacctgtcatcgattcccatcaaagcttccaaaacttgaccgaagtcggtgagctgcgtttcgatgaacaccttcgccctgtattctggcccaaggtgagacggcggaggcacgctgtccaagttctatgagcagaaacagcaattggataatgaggcaaaatctcctcgctagctggtcaaatccactcacgacaacccagtagccatgttcgttgagctccctaacgacagctacgcgacggcagtcaatctcgagctcagcgatcgttcggaccagatatcacaggaataactaactcacactttccaagtttcccagatcctcccgtcacaatgactggcttggtcacaggcgtgctgcgctctccgttatacctgagcgtctgcgttgtgaggattcccccaccatattgaaaagaaggcatctctgtcggtgtcggggttctccggtctgccgtcgatgcgatcgctgcgctgttaagtcttcttcggaaaccgtattgcgaagtttttctttgggcgtccggcaatctcttagtgtttatatatctatgtcatgcacgatcatgcacaatgagtctcatcgcgatctaggctgcaggagatcatcgatcgccagcgcctgagaagccccgggccgacatggatctgttgatgggtggaggttaagagttgcgccggtcggcttgataatagtccggccggcgttcggggcaagcgaagatcgcggcaaagtgggtggaaacaacgatgaaaggagatgaataatacgtatcgatcgctttgtatagggtggaaatatgacctgcagcttgcagcttcatcgtatcgacatgtctgtagcaggtcgtcgatatgcgatacgcaagcatgctagcatgataacctctgagagattttgagcgagtgaatagactgactcctcggcggtgactagtagaggttccgcactaattgaaagtaccggagacagagatactagctccagagcatcttgttccaagcaacgcagaacagacatgaatatcaatggagacgaaggcgaagattcaggttctgaacctggccatgccatacaagagcgtggcgttggttgctttcctgtggccgatctcgacgtcgatttcgatgggcagccgaccaatggctcagagtatctggccatgatacagcaagtccataaagacgaacagtatatcgtcagcattttgctcatagacggaattgataacgatcaggagagaagcggcaggtctgcccttcacaaccaaagcagacatacccgatgcacctgcaacggtcgacgataaggcgagagccgaaaatttcgaggagggtatcgtgctggagcgtcatcctgccctgcctaaggaatcatggtacatcgcttttgatggtcacttcaggtcatatcgcaaagtgaatacacaagcctcctttccgcttccaagcgacgtcatgagttgacaaccgcattccatagtttatccgggaatctcggccggcacttcgtactaggtacaaagcggctacttcaggcccgtcaacaggtcaaagaccgttaccagcaggtcgctcggagacggaatggtctgcctttatcaatggtgctaagcgaaagagaattcacaaggtcgggattgttttccacttgtctgaccaactaatgacaagcgcttacatactgccctctatctagtcagcaatcatcaataccgacctaaaggctttaaacggctctgctgtccgcactgcggatgatgaagaggagctcgccaacaatactgctccggacgcagctgcacaggcggcggaagccgacaactcagattcaccatacacactggagccagagcaacccaaacatcttccacaagagccgcatctatcgatgctgtcaacgctcgaccaggtgagcctcaccaagtcgctgtctacctcatatccccactgacaggctggatcgacaggaaacaatttatgtagctttgaaatcgctgaataaacaggtcttttatcggatccgtgacttggacggccccaacttgcttatggaaacgcaacccggttcaaaaactgggatctcgccgagatccatcgcatcaccgttgtccgcccaccaagcacgatggatcttctcgctgctgcttttcctcgacgactaccttccgccagacgatcttgccgacctaagaaacgtcgccaaaacgtgtctgcgtattgtcaggtggcaggtcacgtctcaagtgcatgtcttcggggagggtcaagacagccatatggaacaggaggaaatgcgcacatcttgctggattattcatcgagcgatcagtattggttggggtcagaacgatttgcctcgggacgccgagtcaatattcgctcgccttcaaaaggaggcccagatctcagcatgacagacataggcggcataaataatcatgaacctagtatccctcagacctcctcgatttcgggccggtcatatagtctcgatttaggagaaggcagagacttttcttccaagcttctctcacgtataggtagactggaagcgagacaaaacaccgcagcaacgctgcctgctatgaatgtccatcgtagactgttggcaagtgccgcttcaatttcctcctgaagcgctgcaggcatagtatagatggcggattttgtatgaagtatgctgttgatgacctgtaatacagaaggaccattcttaatacgcgccaactttgcgagaaccttgcattgcgattcctgaccttttccctgtcccgaggctcaaggggagcgaagatcgcggcaagtctcctgacgaagacggctgccggcgcaacgggcgaggctattagttagggctgtgctaggaggcggtctcgataagggagaacttgtgtcatggcagacacaccttgctgcaaagaactactcaaggcgatgccagctgttgtaccgagggaacgaaaagtgtataaaagagaagtggcttgcggcatcgtagctgaatccactactgcgatgagagcgactagaaacgggcgggaaagggtaagcgcaactcgggtgcagtagaagacttggcggatgacttacccaacccgcaacacaaaaagatcgaataacccagaccagccggaaagacggccgcccaatagacccattctggcgtatccttcgtccatgtggatgccgagtagatggctagaatcggcatcgctaaccctattgctgataatcgggtgtatttacccgttttcttgataagttgaccggctagtatcgacccaatggccaatccgatgctgtttggtaaaagatgcgccccagctgtcgcggaggacgagtccaacacggaagtgaaatatacaggacttgacacgcggatgagcgaaacggtcagctcagagcagatgcagagaggaagcgaagagagagctcacatgtggaaaagctgttgacgacaacggtcaccgcaagggtatttcagttcagatactgacgattgaacaacgagaaccgggaacttacgaacgtttgtgctgccacactcagggtgaagttgctcaagaaaatgcatggcaatgtttggcctctgaaaaggctaagcggaacaatcggattctttgcgtaccagccttcgaatgcaacgaaaagacacaggagggtcccaaatgagaggagtagggtccaaacgcgatagtctgaccaagcgtataggaacgccgtgtggtttgagaacgcaagcagaagcgaggatatagaccctagtaacatcaaggttccgagcgtgtcaaagtcgcgcagcgcctgccatagctcggagccaccctttgtagtccttgaggccggtaagtatatgcatataatgccgatagaaagcagcaagaacggaagctaagcgcaatcatacgattaactgacatgcccaaacatattgttcgatccaaaattaatgcttacctgtgcgtagaatgcccatggccacgagtatcgatccgctatccatcctgataccggtccaccaatgctggcaccgagaccaaaaaccaccatcatgagacctgcaaccgaatggtcaggattgcctgacatttcggccgaatcactctcgcttatataccttgatagtatccccgttccctcaagctagtcaagtcggtcgtgatcacggaggatacggttaagagaccagctcctcctacgatgtacagcaatcatgatgtaagtggcgaacgcagcaactcctgcacatgctgcgctcacccgcccctgccagagccctagcagcaattaatgcacccatacttggactgagaccgcatgccaatgtacccacacctatagagtccgctcgtcagcaccagggcgtgaattaagagcccaaagggactgaccataaagcacccctgccactaccatagctgcttttctacctattgtctccagcaagacaccgtatacaggagtgaatgctgtagagaacagaggaaaaatggatcccagataagaggccaactcggagtgctcgaagctgataaggtgaagatcaggagtgaacctcgatagtcgttcggtcccggcgcaacgaagctttttactcacctggaagatatgcggggagccagagtgggcaccgccgatgattgcacagcaaatgtaaaattgctcgcccataggcccagcagtactatcgaaagcgtgctcttgtcgatactccgatttccggtcaaagagctttcatttccgcaatcgtcgtctcgagtgggatcggctgccccttctgcaaccgccccaaccgcggcttccactgcatattctgtaagaccggcatcatctgcccgatatgatctagtcgatgaatgcctgagaagaggggttctttctgaagtattcgccatggcaaattgaactggttcgagaattcgagaattggtttagggcttcgagaattcgatgcttataaattatggtatggcttggagtggtcgacccgcggtctttgagcgagaaagaagagccggctatttacttgtcgtaagcggcgtgtaagtctcccaaagactagctaagctgagggatctcgatcgatagcctggtaagcactgggataggctgaaggtggtagagaaatatatcatggacaatcgtgattgagactgagaataaaggttgcatgttgcaagttgcaagttgcaagttgcagcaagttggaagcgagggcgaggtttgtcatccaaatgctgtcggacgagaccgaaacgggcgcgttacgaatattcacggaagccgatcagttttggtattgaaaccaaaactgcgcctcgctttcaacgactcgagttccgggtcaaaaatgccgatggcaaggagatgagcggcaggagctggacttgcaagatcttgcagcaacaacatcaggctttgttgttgcctctgttaaaacgccacaacagcaagagcgtgccttgagtgttacaagttgccgttggcttgctgtactcggagttgctcgatcgctttgccgcagctgcccgcgacctccaggctgtccaattgcatttcactctggtactcttaggttcaccaagaggagcacgcaaactccataccggctgttggtacacgatgctgtgcggatctaggatgtactatatagagcttgaccgttcagacaactcggtagtcgccttgacatagcgcctgtaacgtcaggactagatcactttcgtcttccgaagagcctacagccgctgccctcgccttagcttcgtcttcagtatcgttctcaagtggcagctcttgaggttgcgacagcggcttgatggtcacggagttgtcgtctttgacaaatacccggccgaattgtacctgcatctccggtcgccatgtctcctcatttagttggaggctctgcgttcgcaagcgcggtcagatcagtgcaaatcagcattcgacatgatatagcgttcggggagacaggcatttggacagaccttccaggctacaagatcgtgctcttgaagcttccctgcattttcagtcgtgatgaccacgaagtgttcgaatttcttcactgactcgttccaacccgaaggcgatgcgagatcaaccgagacgacgggctctatctgatggggtttcagttccgatcttgccgcagctaaaagctgagcttccttcttgatctccttcatggcttcttgtctgctcggtattgtaaaccatttgctcttgacaatcaaatttggagagagcgtgttcatacggctagggggaagcggcggcaagcgcatcggactgccggagctgaatgcagccccgtcgagaccggttgcgagcggctgagtcgtcgtcgatttccgctcgctagtactcgactgttcggttgctgtaggtgcaaggcatgggtactgcgtgggcactacgtcgcccacagagtctggataaacggtcctcttccctatggctccatccattgccctcaaaaatcctttcctcttgttcttgttggccatggctcgcggcaccggtgaagaggacgcgactgacaaaacttcctctcgcaacctcattggagatgtcacgggtattgcggaaggatttggccgttcgggtgctatggacgcggatttctgagctttacggctagctcttcgtctaagattgcgctctcgagtggactttttgccgttgcctggtggcgtcgctgagtaggatacattatcatctctaagtggcatatcagtcctactgatctcggatcggaaacggtcacagtagcttacatggaggtaacattgcttgctgtcgatgaccccgcaaacttgagaggcgcgttcgacgatccgttgtcacgatcggcggggaatggctcgagcgcagccgtccgaccagaagacaaggcatggatttgtgcgcgtggtacagtcggtttgaaagctcttcctcgttcagccgccttgactggagaggattgcctcgccactttcgagctcttgtcggtattcgtgctggattcagaggatgagtctgaatccgatgacgtgtactctgaagaagtcgatgaggagctcgaggaagtactcgaggaggagcttgaggaagagcttgatggctgactcatactggatgcgaaaacatgtcgctttgcgggtctttcttcgtgctgtgtgtatgcagtcacctccaccttgtctctgcccggatggatagttgcaggacggccccgcttatcactgacatctctcttatgtgcggtattgtcaattttcgcttcgatcttacgcttttttgccggtttgcctatcggttatcgtatcgtatcgtgtcatgaaagtgataatgccgacttgctgccattcaactcactggattcggacagcttccttttcttgcgtcctacatcgcctccagactcattcaacttgatgctagtattgactcgcagtgtcggacatcaaaaggtcatgtctgcagcggtactcgacaaactcactgcaatacatccgactccaaattcaggattgagattgagcttccatccagaaggtcaaagccgtcaatttgtagaccgatatcactccgcctgtgaccgcccttaaccagcgttgcaagatcgtgtaccaggttatatttgagttgatatatagtttctactgagtccttgattggataccaagctttcagagagggaagaggggccgtggtacatagcttgatcctgcgcatgatagcccgaggggctcgtcgtgcggctttcctggtctagggtttgatctggcagacctgaacttcggtaaatatatcagggaaatcgatacgccgtatgccctatgcgacacgtacaggtggacagatagatagcgaatcatagcttttagctactgagtcagtggtaactactctatggaggtagcagtggctgggcaccaagttgcaacttcgcaagcaggcaagcaagctgctagctgctagctagctcaaaggtggaggttcaacgattccgaggcgacgcgaaatcaaaagcaatcacccgccttagctagcttttgaatagataactactactcactactacctgctagtcactcgaatactcgagctttgccgcagtctgcattgccttcttcctcgagactaccagtcatatcctttcggtgcgatcccgagagtcctgcgcaaaccatctcgatagcaccgcaagatgggcgccaaatctcaaatcatcagggatgctcgacttcgtttctccgttgaagcgaacgaagtcaagcgtagagcactgttgtacattgccagaaacgcaacgctggaaagtcaggtgcgacatcgggctcagctgcagctgcacaacatggaaggaaacacccggccgggaagggtttccaaccgatgtatggagacgggcagggggagaggtgagcgggaggaagatatcaaactttgactgtcacgggcgacgagctgactgtccgtaacatccgccttcaggtatcatgagtcaattcggactctgtcgggtatgtctaacacattcgagccctgccgaagcagtgtggtccgtcgggcaaatccgtgctgacgctgcattggttcctacatcactccgctcagtatcaattccgcctcaaagccctaaacggagagctcagtggcgtttccaagtctacttggtaaagactcgaacgtcaacttgtattactacccaatctcatacgagcgagaagcgtatcgcgatgtaaaaccgactccatagcgctctttcaggagtcaaaaccgccactatcacgatggatacccgaagttccgactgcacggatgtgataccgattccccaagttctgatgtgaagcctagccttctacgtcttgaccttcctcattgtcgtttagcataagacagatagcatacgagaacgctgtttgacagaaagggccctgtcgcctatcgccttggttgtagctaattggttttggtttgaaaacgcatctaaccctaacggagtccacaagtatcaaccgtgcaatcacactctagttgtttctaggattgaatcaagtattttgtggattttatgcgtttcgaccgaatcgcttactagcttactattagaggaccgtaaacggaattcttcagaaaatcaatcacccatgatcatcctagcctgtatccagctttaccatgtcccgctaagcgatcagttcgcaagtcgacactgctcgtgtcgaatgaaaaaagaaatcatccaaagtgattcttcccgatcgctttttttgacgaaaccggctgtcaggacatcctgcgctatatagcacccatcaaagaggctccctgcgagggcttcccggacattccgttggcgtaaccgccgtcaacgctacctctggaccccgcttcgaagctcgaagacagacaagcaatttcatgattgctctcgggattcaaggaggagaacctttacttcacatgctgctcgagaatccagagtctggcagctacacggctccgctcgcactgccgcagtatggatctttcgtcacggagacaagcgacgacgtgcagccgattgacactggatattccagcggagaggccacggttaccgcagaatcgagccttatcagatctaggtctcgtttgaccccgtcccctcgaagtggcagtctgcgaaggaggactgcggctacccaagactgcaaaaaacatgttcacgaagacacggttgctcgaccgggctcatcggtcacagcatcaggaaactgcaagcccttccccaccatgcgcacgcagccatcaggatatgtcacagtcggtgcgaaatcacgaaatgctacggtctgcggagaggtaccagcgttacctacatggcttccactggacagacgacacgccagaaccagctgccagaagcctttgcgatcctggaatcgctcttctgcgcttccagagtctccagcgtcgtctgcgccctcatcacgggctaagcatggtctagtgcgctcatactccttcgagagtgcagccgaggagctttacgccagttcagcacatcacctgacgacgggtgcttatcttagcatggaaagctattcaaattctgacttgaaacgatatgcccgcgagaaggaaggttcctctgctcagcatccaacacttgtcacgtcagacgagcctggaaagaagttcttggatacgcctcgtcatttgcggattcccgctcgacgtttgagcgagggatcatcttgtggatcacaaaatgggcttagaccccaattgagccgcaacttctccagcacgaattcggtcaccagctactggagtcgcttgtccgccaacgacacagacggagcttcttcaaacccagatatcgatgatgggttccctcgaggcggtcgcccgtacactcgcttaaaatacggcggaaaattgagcggcaagtcggtgtattcctctggaggccctgcttctcctttatcggaagacggttcccgcctctcggacgccaacaccgacatcttctacgggccgcagcggagcttggagcagcttaagccactcatgctatctgctctactgttcgggcttcgattgcttgccgtcgtacccgctacagtgggcagcctcgctttggtttggcccatccttcaaggcaacgtcagggatgcagcgggtctagccaacgccttgatggcactgccatgggtaagcttaggctcagaggccatccgtgttctctgcccagctgatattctgatttgcaggcggtgcttacgggtatcttctgttttgaactcacttcggggctcagccaacgctggttgcttcactatgctctcgctcctacgcttcttcgcttggtctcgttgcaatcgctctgttggccttgcacattcttgactctacgatacatcggcagtatagatatactgctagggtggatcgtggtagcaacgactacggcgtgctcccgatcagtccagatttgggtcacgagcaatgtccccgatcagctgccaccgcgactgcttcaaacagagaagaccgctggtagtctcgccgaaactactattgacacgaaaaaactgccgcccctttcagcctcgaacgcaaggcagcgcatctgggactggcaagagataggtcaagtcgtttggatacgtgttgcaattttgtacggggttaccacttggttcctgcttgggatcagacattgtttttagccatgaccgtattggcggattatcatttccgcttccgccgcttcggcgtgactttgaaccgaaatcttgctttcgaccgaccatatataaaacccgttgattacccgtaccgaaattcggtgtctgcgtcttgcgattcccttactgtcgtactcttcttcgtttctcctgtcaggcctcaattacatctactatggtatacaattcgaaatccttacctcgcgggtatgtatcggagtagcacagtgcttatgtcgcgtcaattgatctcctgtctctcgaagcgtcctggtgccgaccctctgtttcttcgaagacagcccagaacaagctctcgatatccccaccataaagaagcatgtcttgaggctcgctgatgctggtgtggcgggcttggcggtacatggcactaccggagaacctgtccttctgagtcgagaagaacgacgtctcgtcctaacagctacccgagaggctttggataccgctgggtaccaggatcttcccattatcgcgggaaccggcgtttatagcacgtcagttcgccacagtatctgatcacatgcatcgagcaacatcgtcgctaaactggcttatttgttagttgggaaaccatcgagctgtgcaatgaagccgccgctctcggagcttcttttgcgatggtggtcacgccagcatattacaagggcgtcatgacagaacaagtcatccaaagctatttcttggaggtaaattcacttccaaccgggactgatacgtttagccaatgcgtttcacgtttcgacaggtggcagacaattccagcattcccatcgtgctatacaatttcccgggaatcgccaacggtattgatttggactttgacctgatcaaaggtttagcagcgcaccctaacattgtcggcatcaagctgagctgcggtagcgtttctaaaggttcgtggtactacctcctcacgagactcgagtcgcagaagcctcacctccgcaaacctacgacaggggcacggcttcagtcgcaattcgacgccaaagactttggcgtatatggtggacttgcagacacgtaagaccagagcctcaagatgtcatgaacagtgtaagggctcaacattgttctgctaatcgtagcatgctacacggcctgttgctgaacggtaccttgggcgcgatcaccggactcgccaatgtcacgccaaaggcgctagtcaacgtctacaacctcttcagagatggtaaagtggaggaggccaggcgagcacaagaagcagtgagcttggcgggtgagctggagttgaagggtgtagtacccggtatgagagtaagtccatacttcgccttgcttagggctcttgggtatagcttatatcaataaccgacagtacggatgtgttaagtattttggatatggcggtgtttgccgacggtatgtgcttcagaacccgatctcaagaacatctgtgattgactcagagcatcgaccaccgtagaccgttgcccgcgcccagcaacgcagtgagttggtgaccaagcgcgagtccgccaggaaaagcgctaaatattgcgatttttctagttgaagaaatcaatcgaagggtggattgaaccgatcatcggtcaagaattttgagctgatgcggcatgtactgtatgtagtctgattgacagctgtgtcatctacatcgtcaattgcccatgaatcgcaaacgagacgagctttttgaagtccccaaaaccctttggcgtctcagaacgtactggacccgcgatttgtgaggaaaggttggacctcgagtccgtcctcgtgaccatcgcggcgaccgcggcgcttctgttctctgggtccatgtcgagcgtagtgagaaacgaggtgtcttgtagatcggggctcgatgatgtcactgagaggaaaatatcgagaagctgttgttgatttgatctcaatgtgcctttcaaatccagaacctgtgtttggccatcatgagcttcactccgtcttcatacgaccgtaaggtagaggcggcttaccttctggaaattgctaaagctcttatccccgataagtaggcaatagttttggacaaagccatcgggagggtcctttacatcgatgtgatcagctatcacaacgagttccgaatcgaatccggtaaaggctcacttctgggacaagcacaaccttgagcatagtttcgagctgactggtctgtttgtgaacaaagcgggtatacctgcagcgtgcaagggatcagcagctaatctgaactcgctcgggacgacttcgatactgcttacgtattggccgtagacgaagtatattgctctggtatatcgagaaggcaagctttgatcgcctggatatccagaagaacctgttcggccccgactttacgaagaggccgacttctgacgacagcggctgtgtaccgcgtcataatcatactatcgagccatgactgtcaggtggaaattggggactattgacgccaaaggacttaccctactgccttgtccgcgaaacttcgcacaaatttcttctggttgacgcgctctcggacaatctccgcaacagacttgatggagcccaccaaatctgatacgtatggcgatcttccgctaacattttcgacatttgaccaagaagtcctgagaactgtcgaaagggccggctcgcatgccgattccaattcccccaaaatcgtgatcagacatgcagatatgacgctaagaagtcccgtcagtcgagctcgcgcacgcaaggattctggaaccctcaccctagaaaaagatctctctcggcttggaaagaaacatcatctcgcaagtctgggtcgattgtgtccttcagcttctcctcgagctgcatcggcgagtacgaccggttcaacgtcaatgatattactgttgcccggatttatgtaggtgacatacttgtgcactggttgttaagcagtagtcggcggtattcagagcaaggcaagcgttcttgacttcctgggtattcgggcggctgtccattgaaggacgcccttccgctctgtgtgtcgagctgtcaggttccggtcgagaccggcatagtctgatactcactttttcatgcttgctatcaggacatcatccgagtagatcctaagccatttcgcaaagattccggcgaggtctttcatgcctttgccagtagagtaccgtcggcattgttccaggatttgagcgtagaaatagaaaagttcggtcgacgatgggagaacagagacggatgtctctccctctattgagagcccttccaaggagggcctggacttgttaccgcggtaggctgacagcatgtcgctgagggccttgtcttgagcatccacgaataccttcatggactccccaaatatgctagatactgagctggagtcctcaccgaatggcaatccagaaacgaccttgtcaaactgtactgaggattctcattagcagcgttcgtgcggcgggtcccgtctcgtctttaccggtctggagaaccgttgagccatctgattttcccattctagtgttacttgccaggcttctaaaagggtcgctacagaaggagcgcgatcgccgtctatacttgctcgaagatccgttctgtcaaatcgggcataaaccactaggcagcaccgcgaacattcttggcttcagctcacctggtaccattcgcgaattttgcgaccaatatgcgatccacctcccatgacgcagggaacaatgacgcgtgatcctcgtcgtgatgctttatgacccgcctgaaccatgcgtatcgccttgctgtattatccaggtgaccggcctaatatacggtacgatcagtcgagatcagacaagaatgacgccaagtttgcctcacctcgctcgaaggtgcgaagatccgcctatactcgcgcaattcagtgttcacatatctttctactgcatgtgctctgaaggggtactttcagtgttggtaaacagcggttggagtcgtgagtgggcttacttgaaatcggaacccaaggcatcggcaaccatgtaggcctcccggactctgacactgtctgtaactttgttgggatcttggagcaaacttcacgtagcccaagaataagcttccttgaagcgagtccctcaccttgaatggatcttacaaagcatctagctcctcactgatgacttctttcacttgggtgcggacatctgctatctctttgaaaacaagggcgacaggaggattcgacgtcaatgattgcagagaggacgataacccatcgattgccttggtatttttggaaaggtcaggatcagtcaagcaacggcgaatgtagctcagcgttgctcaccgctatcgagttggccatggaagcataatttttagtccctaaaagccctttgagctcttggtgcgcttgctcttgttataggaatttggggagaaatcagactgaattttcgccggggcttcttgggtttcgctcacgaagcattccccatcgcctaagagcggttatagccgtcgtcatgttccgtttcgctaaatcgagtcgctgtatgtccttggtgattgtagtcacgatggcttcggcttcggctgccttctcacgaatgtcgttcacttgatcgatgagttgctagggaaatcttcgtaattagatacggaatttgcagctgcacgggctaatttggcactgggcataccgatatcaagcgctgggtttcctgcactctacccgggtcttgcttctccataagttcttctctgagggatttgatcctggacttcagtgacataatctttctatgctgcgagcgtcgaagctcttgaagattgtccagcgaagcttctgcgacgagatcccagcaggttcgtcatctgctaccgttcggcagggcaggcaacacttacgatctggcaacagccggtgcagctgtgtcatagcgtcagcgggcggtgtttcttctactcctgcttctccgtactcgacaagcacatcgtgcacttgcttccatttgtcggtacttgttgtcccgctcgacatgctataaagtgatgagcggtcgaacgcggtatttaggttgtattatcggtccctggtggccaacgtgaagggtcccactaccttcgatttacaatctatatacctcttggtatgttgacaccgttatttgacgtctgtgtccgtatctaataccgggtggactggggtactggcttccttgtttctcgcgcatatccataaagagttcgagatccacatcatcagattcgatagccagtgtgtaggcggactcggccgaggttgcgttattttacgacatcttacgttggtgtcgacgaaatcgtcgttccgcgtcgccctgcgcaagcgaggtcccccaagtcggggctcgggcgatcaaagcaccgtcacgtcggtacacgaattcaccgttacgaccgagccctcctcccctcactctgtgaagagggatgcacatcgattccgcgccacacgtacatgaacaagcgaatccaggcatcgtcccgaatttcatgagtcgcattacctctcggaagagtcgtcacaggtgaattgaataatggcaaaacttctcgcaaacaagatcgtcgtgataacgggtagcagtcaggggatcggtcgagcaaccgccataggtgagtccttgtgtacaagatgctattccagcaccatattatgcttcagttctctcatctgctattctcacgcatccgaaacatccacagccgctgcgaatcatggagccgatttggtgttgcaccacctaggcaaagaaactgagcgagacgtcatgaaagtccgagaggcggtcgaggctgcggggcgtcgcgccattacggtcgccggagatatttctcaagtccagacttctgcatcggtgagatcaagcgatccaaggacgtcgaggcaagtattgaagtacctcctctgcaacactccctacagatcgtcgaggaagctgtaagagcatacggtcgagtcaatgtactggtctcgaacgcagggatttgccctttccataccttcctggacatgccagatgatctcttcatcaagacacaacaagttaacttccacggctccttcttcatcacaagggctatcgccaatcaaatggccaagcaagagggagagcatcggggtggggcgatcgtcgccatatccagcatctctgctttctttgggggaattcaacagacgcactacaccccgaccaaggctgctatcaagagtttgatggagtcgacctcgctcgcactggcaccccatggcatcagatgcaactctgtccttccaggcaagtcactgaaagagcaaatcctgagcgcggaacgcgttgactaatacgcagtatacagggacgatcgagacacctatcaacgaagacgacctacaaggtcctaaacggaaaatgatggaggagagaattcctttgggaaggttcggcagacctgaggatattgcggaaccagtctgtttcatggcgtctgatatggccaagtatagtgagcgttcttcgtctgatgcacagcagtcacggtttgagctaatgtccttgtcacttttgtcacttttacagtcaccggtgcatccttgctcgtcgatggtggagcagctgtcagcttgcaataactagtcaataccgcttcaacacagatgtcgatgctttgcctcgtccaagattttgtgattagatgtgtacagcttgttacttcctgttcgcaagtacaaccggttgaaaggggtattagggaccacgaccatgatcgacttcctctgaaatgcgctgttgagatcgtatagtgtccgaggcgtttgcaatctcctcgaagcggtttgagggcctatttgtgacgaataagcgtcaagaactaaggccatggtcgatcagcgaagtcgccctgtaacgaactgttgaaaatactggcatcggggctcacctcttctcgagtcttgtgctgggttctgaaacaacccaacatgacactggtcacggttgaggctcctggcttttgaacacctcgactagccatacagagatgctcggcctccatgactactgcaacacctcggggtcggatggcttcattgatagcgagggcgacttgacgagtcagacgctcctggacctgaagccttcgtgcgaatgtctcggcaatcctggccaactttgaaaggccaatgacgtatttgtttgggacgtaggcaatatggatcgtgccaaagaaggggaccatatcttgacgtaaaaagcgtagattgagattatcggtctgaaaaaaggcaaacagctcttgtgtgcaactcacggtgttcacacatcgagaatagcttgatatctctgaccaagaccatctcgtcgtgatcttccttgaagatcgcgtcgttacaaatttctacgtgaagcggcaatccaatccgtcagaatagtggaacggcaagccaagcgggccgtaagcacatacccgacaacctctcctcgtaccctttcgtcatccagagcaaggccttggcgtatcgctccggtgttctctcgagaccttctcgatcgggatcttcgccgatgcactccaacacggttctgacagcgccgctcagtcgaagcaagttggcagcttgctgatctggagtagcatgcaacctctggtgcgtcaacttggcgggccaaccaagaccttcagaatcggcgatctccgaagccgtcatggggttctgaccaggttgtccgaatccatatccgcgatcctcaacgtcgtcaaagccagacgtgcccttgccgagcagatctccggcactctcctccatttcgtccagatagtcgacttcttgctcgtgcatgctaccgagagagcgtttcgactgtcgaccgaaggatccgagcgaagacgacgaagcttctggggcacgctcttgctgttcggggattccgatgccttgccaagcggatggggcagaggaagcagggtttgaattcgcggtcatgcggggcatgttcgcatagctctggctgggtgcgatcccggcggtcggagttgaggcgccggaccgaggcctgaaaccgtatccttcgagtccttgacggggtttgagttcgaacggctgttggtcttctttcgaacttccggagggcatactgatatgggtgggagttctttgcgagagcgagtctaaggtatccgcgctggtcagggagggcgaaatcatgctcggacccggctggaatggtgccgcattccgcgatagcttgaagtccgagctacctgtagaaccagaggatcttcgagaagccgacatctgcgagttatgcctctcgcccttagccgcacgatcgagactcgcttgcaattccccctttttggcaccgtcatttaattgaacattgttcaaagtcgaagtgatgccctcgacatggccagtggctcgctgaccggtcggagataccattgcagctcgtgggctggttgaaagatagttgtttgagacgggtgggctccgagagttgacgctgacaccaccccgctcccagactcccgatgacgcactgagagcgtccaagcggtctgctcgggcgagaggtatagggatgttcctagcgggaggagaggaatgcgtagaagggggcgccatggcatacgctcaggacgtcaagccgatgctaaaggctctttataacaggaatggtctttagcttgaactgtcaaggtacgattcctcaccaatcatcgattgaacgagctcatatcaaaggataatcggatgcaaaatatggtgataccgggattcaggtggatgagtcaatgccccacactattattgccggcatgttgccgagagccaccggcatgacgtgatcaatcgagatggagctctgcaatcggcttttcacgtgagcgatgctttgcgcgtctcggagtttggcgcttttcctcacgttctgactttccgcggcgagtcccaaaacggttgcgatgaaatctgaagagtcaccatattgaagcgcagtcagtctcctccctccgtttctgcgttcactcgcgcttgatcccctcttgcccccctcgacccatccccactctcgccagtcctggacgtgtgacaccaacccagacgcaacgtagcccgtccgtcccccttggtcgttaccgccctccttcaactttgagaaacgactgaatcgtatctatctgatcacaagagtctcccacttcttcaccgaggtcaacacaagattatcgacatcttccacggacaacaaaatggtgaggcgttggatccctttgacatagcggtgcttgctggcgaaagacgggactcggtgaaattgcgggaggcgatggcaaagggcagatggcataggacctctggatcggatatcgacagaaccactcgacgtctcggctagtgacaatcgacggaatctgtcgcgaaagtggagcgtctgcatggattggatcgctcaatggaagtcgccggagttgtcaggggacatcagggtttcaacctgtgtcaatgcactgtcaatcaacgctacgagggggacataccgactatcatttcctacgtctcgctaccttggctgtggcactcgtgtatgacaacacacggacgcctcaattccgctggtgcaacttgcacatcggtcacgacaaacatcgtcagaaacagactctcgacgcataccagcaattcttcgccacaacagcctttgccatccacacttcccgcattcttcagcgattgccgtctcgcgccagccgcacctgttgcgtttatactctggcttgccccatactgacccgccaattaccaatatagaccaagcgaactaagaaggtcggcatcaccggaaagtacggaacccgttatggtgcttcgttgaggaagacgtcagtagagccttgcccatgagctgttctcttgatacgagagcttatcaggacggacgatttgttttcgatcatcacagcgtcaagaagatggaaatcactcagcactccaagtacccttgccccgcctgtggaaagactgccgtcaagaggaccaacgtcggaatctgggagtgcaagatcaggggatgccagaagaagtacgctggtggagcttacgttttgggaactccttcggctgctaccgtcaggtcgtgagtagattggccaatccgcaaatcaggcgatgctctggctgacccttgccgtcgcactgttcaggaccatccgtcgtcttcgtgaggtcgtcgaggcttagaaacctctttcggatcacacaagcagaacgcatcgttttttcttttctccagacgcgattgtagctttatgcagtgcgctctatggtgatagcattcgcgtcgggatctgtggtcgctgtgcttcatttcgagcgtcctttcaccagctgtgtcccatcatttgaccgcccatacccttgggcttgattcattgcaagtcattcttggcggactcatcggtcgggttacatagtatgatatgcctgatgcttcgcccgatcgaagcgtcggtcctgtatcgatagaaacccgctatctcagtagcccgtccgttcatgacatcagacgctgctaccgctctttcagctgtcctgccctgtaataacgatttatgccagatccatgggcatagttgaacgaaatcatctgagctcatttggacaacatgtgcagttttacccttcctggctgaacgccgcgcttgtctctgttcatgagattgccattgcgctgaaccctcgtcagctgccgagctcgattcgagcagatctaataggcgcaaaattccgaccgaaaggcaccacttttccagtccagaagaagcgtcttgccaagcggtctaccctagaacgaggactgtttcgatcgtccgttccttggtggatgtttcggatgtgcaagcggaatgctagtggccggtaatacgtcgaggcattccttcccgtggacctggacgcagtgctggagagggcgaatcttccttgagtcgaacgaagctggggacattgctgctaccggtcccgcgtcaggcagaggttgattccctatgatactcaggcatagtcatcttttgcggtttacgctatacatcactattttgcgtcgagaatcgcagctcaggagttcaggaccagtacttgaagtgtagtgatctgacaaaagcgaaagcatggatccaccttcaggtgtacttctattgcggggtcaagcggaatctacgcaactgaatcggcaggagcaccaatgatgtttggagcggggataacttatgtaggatatatacggagcggagtctattggaacccacttgagccactttgagtagatgtttcctgaggcacacgcggactcacgctttaactacactgctactgactgcagactgagtagctagagttttgtctgggcacatagcgaagactgaacactgggagacgatatttcgcgacaatgatagagtctatccgttgcgtctggttgtagactggcggaaaaagggcggagctcagcgtaatggctcaacagagatcctgaaactcaacctgcccgagtccaaggcccttgtactcgatctgggtgggagattccctacaactgttcgccggactgtgacgttgattccagtgtacgacgatccaacgatgcgctttggtcgagctgtcaaattgatgccttcgcgaacatgctcattagtagcgttctccaatcatcggactgatatgagcggtgatctctggaaattgctgagttgcagatagatcagaagtcgcgataccaattctgatcgggcgaatgtgattgaagtgacagttcgaatttgtatcaccaggactgtcgtccgttggaaacaccgtggggtcacgtagcacgtaaatagtcgtgctttcggagattcgaaattaaatcgcctactccgacacgtccatgcggttaacgaagcaagtcctgtttcgttccgaatgatcttgagtaggtcatctgcactcgggaactgtatcaataagctaccgatcacccacataacgagacggcgaccccggtttcagctgtccgacgcagcgtcagtctgcctccgtcaacacgcgttgagccgggagcttttttcacttttttcacgtgacttctctaatctcagcgccgatcgggaacgtcggggatcgaggtcagctaagatcgtcgagtctcgtcatttgattgccatcgtggtaccggcacaaggaactcttcaagactacccaacagcagttccgtccaacgttctaatatgatatatgggaggcctatcacatctgcggtccgcaagctttccaagcgggagctgcagcaaacgcgctccagctggtccaatcctgccacttggtttacaggcagtcgatcttcaaatattgccggttcacccctgataccccgtccggccatcaacaacgataatcccgaatcgctgcctaatgtgaactgttcatctcctggagtgtcagcacatgcaactccctcgtccacgacgcctagtcctaccttcacatcgatcaacgcctccgagatctcccatttttcccggctgtcgtcacaatggtgggacgagaagggtgaattcggactcttgcacaagatgaacccagttcgaatggaattcgtcaggaataaggtagttagcgggcgtgaggatgacgatggctggagcttcgccacacgcaatgagtcgagaaaggactatggacaaacatggctcgagggtatggacgttcttgacgttggctgcggtggaggtctcttggcagaagtacgtaccgacttcaatcacagactcgcattttggttgtagctcacgcttatccctctatcacagagcctagcacgcgttggaggcaacacgttggcaatcgacgcatcttcgtcaaacattgcgatcgcaagtcttcacgcatcgagagatccgtttctgccattcatcgccgacaaggacggtctcgaagtgtcaaaccctccggccagtgctgcctccagagttggttcgctgcgctatcgacatacgtcggctgagcaattacatgcggagggtcgtaaattcgacctggtctgttctatggaggtattggagcatgtggatcagcctggagaattcctgaaggttcttggggacatggtcaaggcgagtcaacgtgcctctttctatccccgttcgcattgttgaccgttcgtgtctataactcaaacagcctggaggtcatctcgctctttctactatcaatcgaacgcccctctcgcaactcttgactatcaccatggcggaacgtgtcctgcgactcgtcactcccggtactcacacctacgacaagttcatcaaaccttcggaattgttggcgttcgtgcgagaccatatgggaggtgcaagcgtgtgggaaagcgatggtgacggtctcatcgatggcgggcgagacggcggcggtgtcggtgtaggggaagtcagaggaatcgtctacgatcctatcgctgggaactggaagctttggaaagagggtacacccggtggtacgatgtgcaactacatgttccacatgaggaaacgagtagatgctatctagaatgtattcactctacgtttaacgaacttgacgatcgacacgaaacgcatctcattccctgcgcgcgatgagacagacatgctatcgattgacttgcaactgccaaaagtcgatccggatgtcaatattcatcaattggtttagcagggaagtaccttgaaagagttcctgtgtcaccgcagacaagactctaggagaagcaagactgaggtttcgacgtgaataacaaaacctcaccggattcccttttgcctgcatgtcggtcgatcgatatcgtcggaagcagaaatgtcaacctcgggctcatacacacggtccagtccgtacgtgttcctgcacagtcgaaacatgatcatatgtccgtggtcgttgagattatggtccttgcatctgcgacagcctgagtctcattaaaccaatctagatcctgtcgcgaactcctcaaatttcgtattggacttgcacatcgacacagagggtcatgattgttggcatcgcaagttcatagctacctcaacgagcgatatccgctcgggttcactttcgagaccatggctttccctcaagccacaactcgggagttcgcctttctgagtcagattaacactatccaagtcaaagagtcgccgccttcgtcaatcttcgaggtcagtttgatagtcggatttcattggtatgcgtcaaacgcctgcgattgatttcccggcgaatcgtcaatcagagactcgatatcatcggaaagggcgcctatggtgctgtctataagggcaaacacatggcgacaggccatgtcgttgccctcaagatcatcaatttggatacagctgacgatgatgtggacgacattcaaaaggaggtctccctcttgaagcggttgatgatacaaggtggaatcgatgcgagcaaggaacaaggctcaggcgaggctactcccggcagtagtaacggggccgactggaaccactatggagttcccaatgttatcaagtattatggatgctggaccgaggggccaaaggtgtggatcgtcatggagctagccgaaggcggaagcgtgcggaccttggcgagttatttcgatgcaatctgctactcgagggcgatgctgatcacctcgtctttcaggcacgagcctctcccctgactgagttgcagatttgtctgatctctaaggaagtcttgaacgccttggcattcctgcataaaaatggggttatccaccgtgatatcaaaggtcagccatcggtcaaagactcgagactgacgacgcacgactgacgttgcgctcgttaattcgatagcggcaaatatcctggtgacttctgcacctaatcgcgtgcttttatgcgactttggagtgtcggctttgctaccttctcaatcagcaaaacggacaacttttgtcggcacaccctactggatggcacccgaagttattagcaaaggccgatcgtacgatttcaaggccgatatctggtcatttggaatcacgatgctcgaaatggctctcggcgaacctccgatgatggggcagaccgcggctatggcattgagcttgattccaaagtcgagcgcacctcggttgcaaggggaatggagtcagggaatgaaggaattcgtcgcggcagcgctacaggaaaacccggacgaggtctgtctgacctgcttcttgatttttgccttcttgtatgtctcgctgactcgttcggcaatccccggcacagcgattgccggcccaagacctgctcggactagagtggatcaagcagactgccaaggcgtctctctcggagctcaatgatctgctagtcaacttagaggagtggaaagataagggtaaccagagaattagtcttgcacctggagttggtgctccgttaggcgatgacatgtgagtcaggtgtggtatatcggctaagttcggtcgctcaccggggtcatcgtgatgcccagggacgaatgggagagaggagacgacgaatggcagttcaatgtaggttgatgactcgaggctgcattgtcaatccattgaccaaaccgaactgctcggtctttacagacagtgacgtcgagactggagttggaaatcgaaagaggcgcaggaccaatcgaaatcaattctggttcgtctgttaagcaggaaagcgaagtgcaaaatctgtttagtgctcatggcgaggttgtcacagctatttccgaaggtctaagcacaatcaattcgtcaaatccgtcaacgatgagcgctcccagatctctgctgcgtctttttgaaacggaagacgacaatgaagctatgtatggattgccaacaccccaagcttccaacaatgctttcagcttcccgatacgagcaggatccgctcctccgagtactacagaagctttcaacgaagcacatagtactgccaatgtcaacactatccgtctcccgagcgtggatgacgatgagtatggggaggtatctcttaatttcaataccgactttgcgatgggtatggaaaccatgcggcccaatcaatcgtcacctccgaggacagctacgaccttcaagtcgtacggtaacgaaccagctgcaacgcctatcagaatgcctgatgccgacgatgacgacagcaacaacggcttttcttggagttttccatccacgccctctggacacggtttcggcattccagcgcaggattccaacaattacggatcgagcccacaagctagtgaggaggatgatatcggcaccatcaggaacgaccataatttcaatcagcatcgcaaagcttcctcgccggttcccttctatacgcccaacacagccttcgcatttccgcaaagtcagacagcctctcccatgtcaagaacccttgctctggcgagtccttccggggtagaaatgcctctcatgtcaagcccgtcgacttccccgcctcgttccgcaagacgaaccgcttcgacacagcaattagccatattctcgcagccggagagcgacatgccgacccgtccaggcatgtctcgactcgcttcagtcgctgtgatggaaagaaggggttcggaagaccatccagccccatcgcatcttagtagactttcatcgggaagcgactctagcaagatccggacggggtccttcttgtctaaaacgggcggtgttaataagatcgacgtggaccggagtcagagtttgattttcgacaactcgtcggttcgattaccagctgcctcttctgggggaagcttgcgggttagtcttaacccaaagtgcctgaggggtttgaccgctcaagtttttgtctttcaaatcagcctccgccgcccatcatcgatacaggggacgtagcgacaggaggaccgggaggaagtatgccaaatatgcggcaatttgcatcagtcccttcgccactggcagcacagcctcttattgtggcatcggctcgaggcgttccgcgtggaactaccctcgactccacagccacgatgaaacatgtgcctcacgaatcatcgggaaccgaacatgcgttcgtgctgccggctagcgctaatgataaccctccggcgctctatctggcccttggccctgaccctaggccgatcaacatcgccgatctgtctcagtgtgacagtcttttcgatgaactgcagcagaccgcttccgaccttggttcctggttgagcattattcaagaggggctcgacgatgtcttgagcttggacgttcccctcgataccgaattgcaagagcacagcatcggctctcatgtgccagcagaatcacctcgagcggttctatgaaaactgatccatcacgactataacgacaacatgacgatacttgtacaatgttgcgatacaagacaacaagcatgattcagaattcaatgtcctgataggatcgccggtccgcatgaagataactaggtctaagcatcgaaattcgctggcccataggattgactaggtcttgtgccgtgtaaggcgtctgctgctgcagagtcatcgggtaaaattccgagccagcaggcggaaccttgatcgcatatggcaaaaacgacgggagagcggtcggagctgtttgtcacggactttcagtcaatttgggtttgaaccacttcggctaatctaaacgtaccctcgctgccccgatacaccgcgtccgaaggcaccggtaacggtttcggtccaggtgaagggacttgcagcggccggatctccggggcgatgacatagtgaagtggcatatctgggtttttccactggcgaagctgtggcgggcgcaccatcgatgttcgacaagcctctacttgactcgcatggccgggtatactgcttgagacttcctgcgattcagtctggagattctctctgctcccgccggtatcccacgttgctttcctccatggactcatcctgggtgtggtaggtgtggaagcattcgcaatccgtgaccgagccattgcttgaacaatttgctgcggactgggcacaaaagacccatcgctagaggatcctacgggagtctgcgtcccggacctaccgccgatcattccagcttgagtgcgctcttctacgcaatccgcaaagtttgcccaatgtgagctttcaggcaggaagtgtggttgcgcgctcctatgttcggttctcgtcagcgaagtcatctccaggtctgcgattacagggccacttggtcgagatagcgcctgatccgcgggacttgggtacggcatgtccaaatcaagcgcaggtagatatgcagctgcgttagccgcagctaaaagttgacgccgacgccactgggcatctacaggtctttgcgacgcggaacgttcattgatttgacgccgattccgaaagagcctgggcggtgcacgacgctttacagcaaggagctcgtccattgtggaatccctgtctagattcggatgaccccaaactgatgcattcgtcaatacgtttcctcgcgcgtcctcaaagtgacgtccgggatacacccttgcaaatccgtaaatcttcacgatgaaggtcaaggtcaaaccgacgaagagcgatggattcaataccacttacatttagttgccggcagaaggaggtgaatttgcagtgcttgtagtgtacgggaaggacactagtctccaggagtttcggctacagatagagaccttaagttaggcaacgatatcgtcagagcatatgcactcacatcagctacaacaagctgtttgccgtctgaagaccagtacatggcttgcttggcattctcgtcgtcgcggagagctccatacctatcgaataaaacatgaaaaccgtcgcttttcaaacgccctcagacagcgggggtcagtctcgctcacaatttggccaagaagtttgccgggcggtttgtatccatctcttgaggagggggatgggaggacagacgagtggtgaaaggggattgagacatgatgcagtcaaaggggtctacctaaaagcggcctgtgcggagagaggtaattggttcgctcgaaccacgtcaaacaccgattgcgaatgagagcgggttgtgagagctgataaacgcgtttgtgattccggaaataagtgaccagatatgatttggagatctgtcgaattcgttggaaggcaatgtccatatctagcagacgatgcaggaggtttgcagcgagtaggtgacacagtattgagttgacagcgagatcataggagggaaaggcttcgatgcgtttgctgagaataaggtgtcgtcgttcaacggacgaggcgggcgagcctgctattgaaggcttatatcttcctcccgatagacggatagcgaagcaggccggatggaagacaaaggatgatcaccctccgaggcgaatcgacgatctccagcccaaacggacacgttaccgtagcgaggtttcggacggaactcggccgtccctgtcgatgcctttttgctatcatctgggaaacgcgaccttccccttcttcgttcgggcaggcagcacatcccggagcatcgctcggcatcgcgtccgcaccggccaatcacttttgcagtcgctcgctcgacatcttcctttgtgatagggagacggttctcgatgatgtcgtaatgttgtgctatgtcatgtcatgattgcgattccgcaaggagctctttactcgagcgatacagtcgcgccaagagcctccagggtctttttcagcttctcagcctcctctttcggcaagttgtccttgagggttttgggtacagattcgacaaacttcttggcctgtttgagacgatttgacgttgtgacgagaggggtcgttggaggaagcacggtcgcgttgcgggatagacgggcgttaaaagccagcgggcgaagatgacaaccactattggtcagcgggcaagcgaccgttcccaaaagacccagagcgacgcacctcgaccaagttcatgttgggcatgatggccttgacctccttgataatcttggccttagcagcggggtcgatcttgtcgagctttacagtgaaaatagtcttctccttgggcttctcctgtaaagatgtagcgagattcattgagcctcggaacctttcatcctagcatatttcactgacctcagccggtacctctgcggtagcagcaggagcggcacctccagcagatgcagaggctgagggcatagcgacctcggtgatgtttaaccgtgtctatcacgagcgaaggggaagtttagcttcggcaaccggatggagccgttccgccgctcgaatctcaccttcagggcgctgacaagttcggacacctccaaaagcgtcaaactcgagatctggtccacaataggagcgatttttggcgataggggggtcgatgattcggcttcagcgcatcgcgaatacgaagttgagaacgcagcgacgggtcggaaagattgcagtcgagcaggtctatcgagagggagatatttgttttgagctaaagtccaggctccaatagaatgttcagggcttaccggatcgctcggagcgtcctgagggtactggtggccattcgctgcaagtaaacaaaaggtcggggtcgtatgaggttcaagccgcgttgaccggggatgagatgtttcggctcacagaagacatagttccgtgtagtatatgggcctcttctggtgactgaagaagatgctaagctattgtattactgtcagtggtgtgtatgatctgtgacaaggttgaaacccgatcgaatcgactttgtcgagttgacttcgaacccaactatggccccgggcaaagtcatcgcaagcgcaaaaatcgcgcttttacgcgacatttctcgtaatgagatcaatatcatgatacagtttcatcgcatctatataggttcgtgaatgagatatgcggggcttcttgtcccacatcgttggtcatgtatcgtagatgggtatgggatcagttgtcggggccaaatgggtcatgcggccggctcggctgcaaggggcacttcctcggtctcgactcggccttctgcttcttgttcctccttcagtctttccgcttctttttcctcgtcatccttgatcttcttgagcctctcttgttcttgaatttgtggatcagagtttctccaacgcccaaagaaaccatggtagcctggattcacgcagtcattagcgtcaacgacatcttccaaatcggttgaattcaactcactggctgcccatttgcgctgcgcttcgccagtgaacggcgacacactgctgtaagatccagcggggagctgcgagtcagaggtttcctcgcggtcagccatcaaatcatctggaccgctgctcaaagtgtcgaacgcacaatcctggtcagggtcggagtgaaaacgtcagtctcagctcgccgtcggcgtgagttgttttatacgactcacagaacatcgcccacccggatgggatccttgacgtgaagaagctctctgggttgaaacccgtagcgcgtcaagagatatcgcatgacgctgtcggtaaagatgcctggtcctgtccactcgagagcgctttccggcaaaaagacctctcccttggcgaccgcctgcttttctgcctcagccatctcgatcgatttgcgtagggatcggccgatggcatcgaggaacacgggatgtccgggtcgggcctgatatccaatcgaatcaacagatcagcggcggtgaactggggcggggactatttcgctacccaccataatggtccattgtacgatctgatcggcccgactcaagccgacttctcgccaattcgtccatccgaactcgatcgcgtcactttccacgctaaccaccaggcttggtggcccaagctcggcaccgtcatccacgattggagacatgcccggtccgatatcgacgccgtggagatgtgcggtcgcttccgtcggctgggccttaccagatcgtttccagagattgttatctataggcggcgctggtaccttggatcgttccacagcgatgccttgcaactgcgctgcctcgacatccgtttcctcgatcaagtcgccgtactcttcttcatcctgcatttcttctcgcgatatctcgcccgcattctccgatcctgcggcagtatgtaaagccgaattcgagagagataatatacgcgaaagatgggagagtagggggtcagtcgcgttggtatgagggtatccccactgatccgggtcgatgatgggctatggcatggcattcgaaagcaggtcaaatgtcgaaatctactgacgaccatgctctccttcaaacgagtatgacttactgcagtgtcgctgtccgaatagattccaccttcgaccaggaggataaagtatctatgaaatcggtcgagggtgccactatcagttccagccggcatgaccgcccaacctgaaccgtcttacctgaggatatccgtcttcaagaccatcctcggcaagtcttgccataccctctcggccacggtgcctccaaacatgtcacccatccatttctccatgtcggcatcttcaaacaccctgatctcccagttaggcaagagctctttccaccgagcgaattgccacgggacgagatcccgatgtgcgtccgtcgtcgtgatcgtcttcggccggggcgcgagcggtgcgatgggcggggagagtgacagtcgcgacttcaaaagcggcaagaatgacggtgtccggatggaaggcacagccaggtacttttcgtacgtctccatcagctcggccttgtactcttccaggtcgatcgggccgtagatcttgattcccaggtaatcgtcgtcggccttggggtcaaagccaacttgtttctgcttgatatgcgatcgcatatatgccttgataccctcggccggtacgctatcccccaacaatccctgttcgtgcgttttgctgagagccccgtcctcgtcgtcaaacccggctgccgagccttgctgtacatgattatcgacctccagggggatgcagaaggggatgttcgacaccgattcataactagggaggattcgtgtcgggggaatgtacccaatagctgttgcgactggcgaagtgttcttcatgaacgataggacggtcaagaggggtatgacgacgaccagcgccaggagagacctcggtcgagcgagttggtgcacgaggttggccatgcttggttacgagacgagctggcgagtagcttcccgtggtaaacagcccacggcggcactgtttcgacaaaggattttcctaccaactttgacgatgatgaagacaggcggaagggccgatggtcgaggagaagacggcagatgtcttcaaacggattggtcgcacgaggtcgagctgctacctatttttgttttgattccgactcgtcacgggccgggacaacagtcagttaggttgttgttgacaattccctgtcgtcgaggatcagtagggtgtgctatgtttacgatggtagtctatgagaacagaagtgccgagcaccgctcatcatcctctccaagtgcttaaagcaggtctagttgtcatggaatgatgattgaagggtcaaagatcgttgagctgcgaggctgctgacatgatgcatgatgatgaaaagagggtgacgatcgtcttttgacattttattcaccgcccgagagcgagcgaacacagcgcgcgtgattccaccccactcacactgccccccccctgactcctatacacatctccgagcccccgacactagcgcccatcgaggagggggaactcacctaggcttggcgtcctggaacacggaaaaaggggcaaccttttcgtctcgtctatctgtttattccgggggaaccagtaaggtcaagagggcaggatcttttgaaaaggagtgtaatcttctaggagaagctgtcgacgaccgtgcgctcgattcctttccttgtctttttgatgtgatggtcgaggtggttgattgatgaaagagtcgcgacgatgctacttgctacgttgatactcgataagcgagcgggaaaacctgtttcttgtttctatttcggcaaacgccggcagaattgttgaggtgggtaaaggttcaaagaggccaaggggtaattgcgatggacgatggctttgatcgtaaaaacaagaaacgtccaacactcatcaaatcatcatcgtgctgcatcatgatccatcgtttgggattagctggaactccgtccctctcgaatacctgccattgtttgctcagccccagcccccaggccgtgtgtgcctaggcgtaggaacgcggcgcagcaaccagtagccagcagctgagcaaacgtcgcgctctagcctagccttgtctttcaaaacagggaaaacggcacaaacgcgcgcgagggcgaaaggtaggcgggaaggaagaaggtgaaagccccggaaactcttatttgattaatctttccgcgtgaacgtgatgtgatggggggttggggtccaaggcgtgagcgtgactgcgggatggtcgcttacggccggcgggagttgacccggaccaacaatagagacctggacctggctttggctctggttctggacctgggtatggtcgatctgtgtttgacgagcgaggtatacaaagaacgagaacacgtactctggatctctgtacgctctggacccaaacatccgcatcccgtagtcgccagggagaaaacgaaggaccacccttgatctccttccgtcgtccgaaacgcgacccctcctccgcaggtgttggggccactgatcccataacgtcatgaacatccccccatcatgactagcgcgaaaccgaggtcgatccaaccgggtgtgtatcatccacgggatctgtccgcggatcgacacgacgttttccccgcgttttgatatttttttcggatttcctccgaggtcgcgtgggcgatcgggaggcggtcgatatatgtgtggggtgggaatcgacgcccccaccagagatggatcgccctgtgaggaaggagtgaggtgaaactcggcatcgcggttctcggcattcgaggcacatgaacaaatcgacatggtacaaggaaggctacctacttggctcaaggcagaacatactctgacgatcaaaggtgcctctacaagctcgtcattcaagcggttccctgcggaggagaaacattgcgattttcccacgcgacccacaggatgtctgcctcaacctgattcatttggctcatgccccaggtcccgtcgcctagtaatcggtagatgagaacctccctctcgagtcccacacttgcatcaaagtcgaagcgatgcaaagtgtgaccaagttgccctggaacgtttcggatggccatcaaagtgattcggatccaggcatcgtggtaccctgtagccggcgacgaagcggcatgtccaccgccggtcacagcagaattgattgcaggtccgacttggctgaagaaccaatcggtaaattccctcccccggctggaatgccagatacagggaatgtcgtcgttattgtcaacgagttgaaagaaatgtagctcgacagggtcgggaagcgcaggaatttgaccctcatcgtcgctcgcatcgctgtccgcgtttgaggacgacgatgatctcaccgagctggcgcgggtcacagtcgttccaccttgcgtctgatcatcgcccggttggctcgacctgcctgatccgatggagcttgcctggtctgacatgttgcgggatggtgtgcttggattgaagaggctagttctgaagattctccgatgttcaaaacagaggctgttgcttgccaagtgttccccttgattggccaaattcgacaagctctaggcgcggatcgcgcgatatacctctggtacaacctttgtttcggggtttcgattctcaccttctctgacgcaatcgctgtactcatacactctgccctgttctagcacaatctatcatgtagtacgtaacagaaatggtattggccgcaagcctgcaaccaccaggagctcgaccttcaccctcatatcaacggcccgcatcaatacgacacggtgaggtgcgcagcttgcgatcggttattgtgactgatcattggaattggtacagagctgacgatatacaaggcaaaaactctaggatcagtcagtccattctaagtcgggcaattctgactcttccaacgtcgaaaggtgaatgacttcttcagggcaggcttggacgcacacaccggatacttcccttcgttgtgcgccaggagtttatgagcaacaacgacgtcagaacgtcaatcacacggtattgccatccaagcttgtcaaaactgtcgccacgataagccgcgaggatgatcatatcctctgcggcagtccggttgacctgagaccagtaggtgacgatatatggtaccgattttcgggcatcctcgagcagcttttgtaaatcctctagaagctgcgtaaaactggtgtcgcactggaactggctcagtgaggctcagggaggggccttttcgtgaagccgcttgtccccctccatgagctctaccaaagtgtagacgccacagtaatataggtccagcctcactcttggagaatgctccgtgctgcagatggttgcgagatacctggtcatgaggtccaggttgatctcatataccgtgagcccgacttccgaaccttcggtagcggttgataccagcaggggagcagaaatgctgttgttctcgtcgctggctttggtgctgttgccggcagtcgcggtagtggcggtgctgacagggactgcctgagaaatcgacattggaggatcttgcaatgtaaagcttcgatgttgctcgctcatgatgacgaggatgtttgcagtctgctggtgaaccgcaggcagttctggataggtactgcatagctaatattcaaaataatgaggaatcgaagatatcgttctaagcttacatactcgtccactagctcgatagagtgtcgcgcgctttagcaacccagtgtgcaggcaggagatccagacctcctttatcctcgacacaggttacgtgatgcctccccctgagaggcattccaagccatggtggtgtgattacgtgcgattgcgtctcatggtactggacaaccgaaagcatctgcttgcatcacgtgtcggagaaccacaaaggaataggtgatcgcttactcagtgtatccacaggaacgatccaggcatcagacgggaatccgcttttgctgtccacgtctagaaagcagcgaatatctgcttacgacgctgggagtggccttcgactggaaatacacgcccgcttcatttcaagcaggccatgatctaatagacataacgtcgtctactcaccgacatatttcgagagcctacatgtacagatgggaagctgacaatatggagtgatgcgacccgatgactcctgatctgatctagacacatgatcctgacatatccggggggccccatttcttctcggctacacacgcgccggcttccggttcggtgcccgccatttgtattggggtgcccgcagtggacatcgcttcttgtttcacgtaactcatgttcaagagaatccgcttggttcaccagcaatgtcttgtgctgtctcctcagtggcacccgacgatgccgtaccatacgccatgccagggtcggcacgtcgattgtcatgaatgctccgtcaccggaaacggccgccattccaaaaaaaagtccatagctgcacatcaggcaaggctatccaaacattgcttgatgaaggccacgaccttgccgtgtgcttgctcagtttcgatcggcgactccgctttcccagggagtcgcagccaatgatcaacttcggggactgtgaccagttgaacgccgactccagcaacacgcaattgatgtaaagttgtgactgacacctcataaggaactagttcgtctgctgttccatgtaccagcatggttatcggaaaggcttccgacggtttcaagcgatcgaagtatatctgggggaaaagatcgtgatgtgcgtcagggacaatatcttcggccttctgatggatggtcgatgtcgtccaacggcgtcgtagttcccctcgagtgccgcacagcgtgtctggcagagttccgacgttgttccaccagtcccatacgggcgccctctctatgtcattctcccatcctttcaaacgtttctctggtggatacggagaatccgagacttcgctgttagcatatagccgattcatctggtcgaattccttatcttcaggtcccgcttctcgtatccagggtcgtttcagcaaatccccgcccatgccaaagtatgatagtaacccaacacacgcaagtctgccctgagcttgcagcttcctcttgtgtaattcgattgcggcgagtcgggccacgtaaccccctcccgagaacccagagacgaggatcttgctcaagtcgggaatcacacctgaaggtagtgaagcgaggtattgatcggattcaaggtaagtgagaaatgatctgacgtcttgaaggatatcatgcccagaggaaggaatgagcaggcgatgccctggttgtacgaggatgtaaccggccttcaagatggcctctgtgtcctatagaatgagatcagtattgtttggtttgataagcgagatcccgtccaactcacgcttgacagtagggaatataaagtccatatccctcgatccggtaaacatcccacctggatgatagctgacgacaatccctctcggtttcgatgcagattggcattcgggcgaatagtggaaattggcaaacagctcgagaccggaacgagtcaccgcgtaacgattgacgtggattatcgtctctaagtttctcatgccgactgcttcgataagattcgtgatatactgcgggccttatcattggatcgatgaggtctgtgtcaatcaccagtcgttcaagagccttcttcatttcccagtcagatgtgtaatgtcgacctggtggtcatgatgcaacgccggcgttgatcgattgcgaagatgggaagcctgacatttatttcgaagagagacatgttcacgggtcactcaagcctccgatatgatgtcgttcatgctcaaggcaacgacatgcagtcgcgaacacgatagaaccatcgaaaggaatcagaggtataattggcgacatgcgagccgcttgcctgggtcatacagagacattcaggtcgtcagcatgtccctctcgtcgtgcagccaaaatgactgtccgggagtggaaccgtaccttcactcgccgacactctttcttacccttgcaccgctcatcgtcaggctaagattattatattgctcactgacgcggttgagaacgcacttctcagagcggatcttcgcttttgtcattcaattaggagaacactatgtatatcatccgggtcttgcacttcctcatcgattacaatcatatacacgagtatatgcgatcgcttaggcccaaacccttttatcactctcagcagcagccagcgtcctggaagaattcgggggtttgctttcgccgtcaacaggacgtggtcgatggtttctcttcagacactcgcggtagtatttcgattgagggttgagacgacaaatgcagaagacgcctactgccaggacggtcacaatcccaaggattgacgcagcggccacccctgactcctttgaattcagacgaccatcaccttctccactatccccgacgaaaggcagagccgacgatgattcttgttgtgtcgtgcgggtagcggacgggagctcttgtaacggcctgtcggaatctgctccaatttgtgtctcaagctggaggctcaaacccgtttcgaccggccgagttgtcatatcatctaagtgcaaaccgtctgtgatcgtgctagagggtggcgcgcccttatggcgatgagcggtagatgtcctcgtgattgtcactgtagtagtttttggtcgtacccgatataaagaaggggccgatgcgaatccagcgggaatgccgccagctacggtggcgggaagtgaggttccatcgacaaataccaatgaggagagtaaggaggaaggggaaacagtctgaatgctactcccgatagatgtcattgcgagtcgtaaacttccatgtaatgagagttcagatgcaaacgacgcgacaagatgttggtgggctgactaacctcggattcacaagctttttgtaggctggctgacaacccctctggtttctccatagagcaaaattttggagcgaacctttgtcaagatgccgaaatccgctagaggaaccagacagacccagaaagtccagtaacgcgcactgtcaaacgaggtagtcctttcaccttagtccccaaggagagctatatcgcatgtcttcgaacgatgtcctacaaccaaggatgaaagtccagctcgcctaagtcgtctgggttgatggagagtgcccgatcttcttgggcgggcaaccgctccttggaaagatctgctgccttcatttgactcatgaggcttcacggactttgagaaaagaatcgttaccgcccgagacgacgcccagcttgacaagcgcgtctgcggcattacacgatatataacgtgaaagcgtcttgattgcgcggacgagctgggaacgctgggatatggtaaaaaaatgggatgaaattggagctgggaaaatctgatacatgcgctgatgttctcaagatacaactgaggcctactctgtagccgattcatacccgttacctgaaaaggtcttctcgcgaaagggtcctccggatttaggtggctctaacgggtaacgctagagaatgaagcctcggtgatcggtgatcgattgagccggccctggacgacaccgaatatgaacacggtcgactagatgggactctctgcatcggcttttcggacagagctcgaggacgacttgatatctatcatctgccacccacgttacccatcatcaagtcgcgcaagtcgtatgttttcatgttcgtcaaactcggaactgctatataaccgaacatagctctttcaagaccgaccattcggccaatagtatgattgccggcgtttccacggaatcgacagcctgattgctttatacagggacccctccagcatgtggacttccaggctactgcgaatagcaggagtctcctctcaatctttcattcgatacgaaacgctccatacggccatgtcagctcgtcaaaagctcttatcggccaccgccgccttttatcgaggaggcacttccaagggagtcatgttcgaagagcacgacttgccaacctctatacaagatcgagagcacctcttcagatcctgtatgggatcacctgattcgtatggacggcaattagatggtatgggaggcgggttgtcctccgtcagcaaagtctgcatcgtcaagaagagcgagcggccgcaagccgatgtcgactttaccttcgtgcaggtcagtccagccgatctgcggctagcttctcgttcgttcagtcgctcaacaacagatttttgagcaggtcggagtgagagacgagattctggatacaggtgcaaactgcggaaatatggtttccgcagtcggcccattcgcgctggaaaaggggatggcaagcaagattgacgagcaaggcatagcgactgtcaggatcttcaataccaatacgggcaagatcattcactcggtaggtagttccagacggctcttcgaaaccgctcagacctgatttgggaccgtttgaatagcacttccctacgatagatggagaagcagacgtggacgggaactttcacatggacggcgtaccaggaacaacagccaggatccagctagactttatcaatcccggtggttcgaggactgggaagctgctacctacaggtaatcccatcgatgagctggatatacccggtgcgggggtcataccggtcactttgatcgactgtgccaatccatgcgtcatcatcgcttcggagacgcttggactggagggcacgatcctgccagacgatctgcagtcccagccgaggatgctggaggtcctggcagctatccgtcgagaggcaggaatcaagatgggattcttcgcggacgaagctgaagcccgcaggattcgaagcgtcccgaaggtctgcttagtttcgcccacgaagcggcataccctcttgtcgggacagacgatcggagcagaggcagcagacgttgtcgtccggacgatctcgtctgaagacccacaccgagcaattccgattacagcagcgctatgtgtggctgctgcagcgaaattgccggggtcaatcttctcgacagtgttgcatgggggcaaaccaccagcagatcaagccatcaggattgcgcatccttccgggattatcgctgtcgatgccgacctggcgaaagaccaagacgggacgatggtcgcgaaatcagggattgtctaccggacagccaggaaattattcgatgggaaggtctactaccggtctcgagcactatagtctggaaagtacagctcgtgaaacgattttcaaatacggcatcgccgatatcagatccagagtgttcgcaacggaagtgattgaaagaggtccccgactttcgttacgataatcagccgacgagtccatagcaaggatagggagccatgttggcctttcctcaggtttgaaacttgcggtcttcttcaaccatctctgctcaatccgttgcccttgagaggaggccacaattcgccgcaattgcttggtttcttattgtcggatgaccctacaagcgaacgatatgtcggaagcgatccgcgggagcagaagcgatcttggccgtcctcaaggtgctcgatcgttcgcattagcgactcacctctgaatctccgaatcttgtctgcgggaaagactcaaactctatttgagggcgactcctacctgggcacagcttcttccgaagcgatattccgaccgaaatgtgtcaagtttgcggttccggaggtagcctattggccatctcgctctgttatagccagccatccgaagcgttattcgaaaaaagagggccccttttgggacttgcggcgaacgccgatgaccagaatctcgcgctaacctcgttcgtcatctttcgtactcccctcatcgtgcgggaactcgccatttttgtcccgcctatcatgcacggtccgcaaggacccgatatcagaatagtcgtcttcttctagccgcccaaagattgaaggtcaggtgacacgggattggctcgagatgggggaggactgcttgaggggagcggacggttgactatcaggcagggtacttatagcgtcgagttccttcaacaagcaaagctctcgctcaaagaaattaattagtccgtacagtcgaaatccagctgaaaccataccctgataatgttctggactcctactattctggcttcgaccttgacggcgttgctcgtcactgctgctcctcctcattcgctcggcaaacgcaatgcagactgtttcgcggataatgttgatggatgttactatgacacggtcggacgcaaaggagctgctgcctctgtgagtttgactttgacgtcattcgtactggggcactgctgatgatcttcaccgttccgatatctgcaggaagtcggaacttgctctgccattgccattgacatcctcaaggccggtggaaatgccgctgacgggatgatcgccagcgctctgtgcgttggggttgtcaatgctttccactctggtattggaggtgtaagttcagggcagaggatcgatttgatcgaatccatactgaagcttcgcgatattgtgttagggtggtttcatgctcgtgcggtacaacaacgatgatggaacccatggatacgaggagatcgactttagagagaccatgcctgcggccggaaatcagactgtgagtgttgcgggtgaagaggtcgacaccaaacagtacgctgatggacgatcctgcacggacgcagatgtactcggctgccggtgtcaaccagaccttgtcgaccatcggcggactggctgttggagtcccaggagagatgcgaggtgagtgcttgaattgttttcgtcaagcgggatctgaatgctcaatcgatccccgacgtggtgctgcaggatggcaactcctccacgatcgtcacggacgtcttccctggactcagcttttccagcctgccatcaaacttgcgcgaaacggcttctacgtcaacgtcgatctcgccgacgcgattgctcagtacgccaccgggtttatcatctcggaccccaacttcgccgctacctacgctcccaacgggaccaccctcaagaagggtgacacttgttacaggcccaacttggccgatacgctcgagctgatcgccaatgaaggtgtcgaggcattctactctggcaagctcgctcaaggtatcgttgacaccaccagcaagactgggggaatcatgaccctcgacgatttggctgggtatgaagccatcattaggcaacccgtcaacatcacctacaggtaaatcggatgagcgtggtctccgatcgtcaaatactaaacgaatctatctgctctgtagggacaagcgaatcttctcgaccgtcgcgcctagttcgggaactgtcgtgctctccgctctcaagatcttcgaggggtacgagggctcttttacggaaaccgatcccgagtttaacgtcactactcatcgatgtgagtactgacactgttcatgatgatgcttgaagcaaatggctcaccgagatgcccgacaatagtgatcgaggccaacaagtttgcttacggtcaacgatccaactacggagaccccgcctttacccctaatgtcaccgagctcgagcgtctctacttgaccgagcctgttgtcgaggccgctcgagccaagatcaacgataccgccactttcggaacctcgttctacacccccagcggatatgtacctggccctgaggccggtaccagtcacttggctgtcgtggatggagaaggcatggccgtctcattgacgacgtgagtgccggttttccaatggtcaagttcctggcttacctttctgatgttctatagtactgtcaacacctactggggaagccgaaccagtgagtgatcacaattggcccttcactgatcacatagtctaacgtctgtgcgttgctgcttcagtgacggatgacggtatcattctcaacaacgagatggacgacttttcctctcccggtcagatcaactctttcggcttcgccgctagccccatcaactacattgctggagggaaacgccctcagtcgtctattgctagcagcatcgccgagtaagcatcgcaaacgcctgcaccttgtcttgcttttcgccatctgacttgatcgtgactttgctagggatctcgagaccggagaggtcatgatcgctactgggtctgctggtggttcgcgaatcatcaccgctacgttgcaggagttgcacaactacattgatgtcaagcgtaatgccagcggctgcactcacacgtaggtcgtctcaggaattcttcagcgactcgagacactctctgacccgcttcatcccgtcgtagctctcgatggcacgatcagctcagcgggaccacgttcttcgagctccccgacctcagcaagggactcgctgggttcaacaacgggactgtcgcctacatgaaatcgttgggatacaacgtcacttaccagggaacgagcgggtcgacctctcacgtcgtcgctaggttgccggatggaaggctcgaggctgctgctgaccccaggaaggctgctgggtacggtgctgctttctaagcagaggagacgctccggaatgcggatcaccaaaagagaattgtcagaacaaaattcatagtttattttagcccataatatgtttatcgacatgcgtcttggtttgaaaaggggaggatatggtcaagactggcgcgcaggtggatctgttacttacgtcagttgaattacgtgaatgacgaatgccgggcgatagatcacctagatcccagatcttgggtcctgcatttcagaacttgcaaccatcttggggaaaatccgtagctcagctactaaaccggctgctgtccatcgctgcgttcactgctctggaggcctgtaacttcagctcgttccgaagagcaaccgaaacgcagtagaaagctatgcgcgatcgatcgagataggagaatactgcttgaaaagaggcacatcttccggcaactttgcctcgcggatatcgcttaaatggcctaccttccgcctcctcttacaacccctcctctggattggtctttctctccaccttccagacagaggaccctccggactgtctcgaatcagtctcagaggtcggcatcgggtctcaacatcaagacggacgatgcgcagttgcagagccagctgcaattcacggcccggaacccggccggtccagggtcgaccattactacgccggtccaattcctgaatcatccgcctaataccaatagtggagatcatcccaatcagtactccctaaacgaatctcctaggtcgttccaggtcccggcgttctcgtcttctccggcgcaggcgacaccggtacatccgagacaacctcacgcttctagttccactcattcaggatcgacttctggtaaccaccaccctcatctctacccgaatgctaccggtgcgaacagtacaccctcaaaggcccgcagaggaatcctcgtgcccgctcatgcgtatctacaaaagggtaccaaggaagctcgggcgtacgcacagaagttcgggaggtttgattatgaaggggatgtgaaagtcggagcaggggcgggaggagcgaacgggactgcgagtaatgctacaggatgggcgatctgggtggtcgacaagtggtgagtcaaaaccggaatgagggattcagtaaatggttcgctgatactgctcatgtccgctgattcgatacagggttaccgattcatcccggcctctgaaaactattatcgtaccgacaacagccgcagcggcaactaaccaagctgtgatcggatccccgcctcaaccatcacatgtctctccccgtcgttcctcgtcaccaactgagaaatcatccgcgaactccacatcaacttcacctaccttgaccaagggcaacctgaactcgcaaagtcaagcggggaccattaccctacatctcctcacacctcaagcgaacctgagtgacgttcaagctacacgggagatcgaggcagcggtacgattattaaggcgaggcagagagggaaacgggggtggagctgagttggctgggtcaggcgggatgggctgggaagatcgcggtaggcttgggttggggggagttggacaggggagtgtgggagttggaatgggtatgggcgcgggtggaaggggaatcgaggtgagtttgtcttgcgcaagactccgctgggtcgatactgagcttctttcaatcacgcagacggaatggggggttatggttgttacctcgttgtcgaacctgaggcaagacgtccagccgtaagcggaaccaaagcctggaaagattcgtatactgacatcgaccgacatgccccacagaatcctggttccttccggcgacctccgtcccgctcttccgctcattgaggtcctcctgaatctcagaaggctaggctcttcctctcgacagtcactcacgctcgagccgccttcaaaagcaacacaatacaaatttttctcgctctaccgcttccagcattcgaatgaaggcggccccggcaaattcgagcgcacgatcgaggaactcgtacgggttctgaagattgcgctggctttctggggtctgagcgagaacgaggaggatgaagagggcgcagaggtggcaggtttgtgtacagataagatgatggagaggataggaaagtggaggaagatagtcaagggattgaagcgtgagcgatttcggactgtttgcttcgcttagtcgctgaccctttcgcttctatgaagaggaggagctgtcggctgctctcggatcggggacccaggaatcgatggtgagcttctgtcaagccgagccatacattccactggcttatatagatttaatgataggaggagatcctagcggcgcacggcccttccatcgttgctggtctactgagcagtatcacatctgtgcgggtgaagctggccgcccttgacctggaaagggtgagtatggcagcgctcgggtcgaacggggagtttcaggctgatctggtgtgataaaaggtgccgagggatccgttcaccaaacgaagagactttcaagctgctatcatattctttcaggtagggttcgactcgactatcccttcgaaacagaggttgacttctcaacctggccacagcggacatatatgcatcggacgactccggtcttggatcacctcgacgtggaaatctatactgccatcagcgaagcgtacaacaaggaaaagcatcacgatcacactcgaataactcggatactgaagaatcaggtcacacaagccggatctaatatcgtctccaatctgaacatcggcctgcgacgcgagcgggatcgcgattctgatgatgaaacatacgacaccgccgatgatggcattgagaccacgacgggcggcgggaccttatcggctccggaaaacatgaccggcaacttggactgctttgcaagacttgtcatcacaggcaaatccggcgtcggctatggtcgcctgcgtgctttgtggaccgacaagatagcggagcatcccagagacggccggcgacatcatcatcacttacgccatcgggaacctcactcccaccatgattttgctttcgacaagtcggatcaacgtgagacggctggggaaggcgacctcgacactgtcgaagagaccttgtcaccagagaagcgcgatggacgtcggcatctccggcacaagagcttgagcacgagaaaaggcacgcttcgcaatatgaccagcaagacggggcatgcgttgaaggattgggccagtcggtgaggcacgaagctgtattggcgtgagagagcaactgctgacgaacacttataaaaggcgcggaacgctctttggcgattctggtgacgaacaaatggcgtcagcacccccatctgtcgccgatttcaggccgacaccgtcaagaaatccatccttgccagtggttgtcctcccgtaagcgtatactcagatgccatgacccggaccttgactgatcggacgctctttcgcagtgagagggacgaaacagacttcaatcagcacgcgaacatgcgcagtacgtcgagacatcgatgtctcattcgcgtagcatactgatacccgctttacaggccatacactagcccactccgacttgtactcgtcacacgggtcacacagaacggcttctgaaacatcgcgacctagtatcgtcaccaacctctcctttgtggagtccgacacattcgacgaagctggtcctgaattttccggtcatcgaggctacgacccgaatccttcaaatcggacgtcgatcgctgccgatgcaaccagcatccagaagaagaagactagactcctaggtcgacctcggcgacctctcgaacgaatggtgaccacaggtagctccagaaaagctattgccgcaggggctgagtggatccactggggtcatgtggatgcggtctatgaggaggagctcgcgagacaggtccgagaacgaggtttgcggcggcggtgagtcataggcgcggaatgaggttatcagaaacatttctcacatgtggtctgcctccaggtggagtttcgaatcatcgagagtaccgggacaagtccttccagtccatcagtcagtctcgctcaatgttacttcgtgaataaatggctaaccagttaatcacgcagtcgataccttaacgtcgacgtccagctgtgtgcgagggtgtggatcatgcgacagcgcgaaagagaacttcgcgacaaggtggaagcatatgctgtgagtggtatacagtcgtacaagcccatcaggttattgacgatgaagtcaatcaccaggctttagaggacgccgtgtggaagacgtccaagatcattgtgcgagagatcaagatccgccgagccaagatcgaggctttacaagaagctgcccacggacttgtgaccgaaccggcaccgggatcctctcatcttactaaccggaccgactcggacagcatcaaagagcacagtcgactcatggctagccgaaggctagcaaagcagctggcactaaagaacgacaagctgtcgtactcctcgcgcgagctagaaaaaaacgtctcggccgtcgagactgcaaaacgcgtgctcgattcctttgcccatcagtacaccgatccggctcgaaagtctgagtcgatcgacggtgaggaaacagaaacaactccaccttcagaaccgacctggacgaattggttcagacgtctttggccggtatgaactagtctcctgttgatcgaaatacgttttcttgaacatgtggaccgacgtatcattacaaaggagtgatacttcgtagccatagcgttcacgtcatcaccagagacctcgtcgggtttcagcaatgttgatcgaaagaagctacgatatcctacagcccggaacgacttgtgttgcatccaggataaaagtctcgatagcgaggccacttggttcaggatggtgatgatgcaattgatgtctttttcctgctcggccttgacgtagcgcagtcatccggccaagcgaaccagtagtgtactcacgttattgatcactccttttataccgatgtcgcaagcggatgatgaaatcagggttcttcattctcggatcctggtagctatcgcttgttggaaatctatttagtctcgaagaacccatagccacgggactgcgcggcagagcaagcagacataccgggggcaattttcatcaaaccacaaggccacacaacatgcccgactccaaatctggctcagagaacacagcctcgctgtctgatgcgaatgtcaaccgcgctgagatatctgttggcgattggcagacttttatagatgaggagaaggagcagcaggaatgggcttaccgaaaggatcacgcccagcacgcggcggatcgtcgagagagagaaatgttactgaagaaaaacgatcccatccaccatcctgtgaaaagcgtaagtgaaatttccctatgttcactctgtcctgacttctgctgtaatgtgattcgccttcatagggtgggccgctgggtaccggacaaacctcttctggtaccggttgggaaccgaagggaagggccaaagagagagccggctacatgccacgagggaacaacaagcaggctccgaacatttatccggctcctgacggttcgaagagctcggagggaaagtatagtgaatctgttcaacgactgtcgttcaccactggtgatggtacatctggagatgaagaccgaggctatcggtctgattcgacatatcacgatgggccatcgatggcagggagtgaatctaattctcattgagcgatccggagaaacacctagcagtataacattagtgtatcttgagttggcggacgctgtgtcaataatccaattgattggcagataactttcttgacgggttgagacatgtatgagcactcatcttgaaagagctgtgagctggtaaaaaccattggccactttacgatgtgttccgcgagacggataaactcacccttaccagtcagtttaggatcagccaggaaagaggtttcccgaacaaaaatgcaggatagatactgcgcttgagagctgtgctgagggaatgtgcacatgatggtgcttttgacacattcagtgcatggttatagaagatttaacaaaacagatagatcaaaaacaaatctgacaagccgtgacctttactttgtctttgctcccatcacatactcttgcctccaacatgcattcaggcaatttgctaagtcggcccattgttatgtttctgggtcgtcttcaggtcgtgtttcggcgtcgtcgtcgtcttccggcgtcgggatggacggagtgtgagtgtcgccctcgaagcgaagcgactcgcccagtttgagcgaagtgagacgcgcgcggtcagatggaaccaattttcgcatccgcggtgtccagcgaaaagccgcggtgcgcagagtagcgcggcacaacgaaagaggcgaacaaaaggaaacttgtaggcaaacaattcgattcgggaacaaagagagctattttgttattggaatctcgatcaatgtgctgtactgtctttgtgatttgctgtgtccagggttcaaagatgaaacaaaaatggggcccgctttgttgtcgtttacacagcatttattgatcgatctcacggtccgcggtcgagccggctttgatttccgcagcagatcacctcaagtcattgaagcgtaagacgatctgatatggaaagacgcaacagacaaccaggatcatagtgtacaacaggtagaaacattcgtgaagaatcgtaatgtagatgtccgtgttcaatcgaatcgcgcatacttgtacgctcgggtatccatttcttccccttccatcagctgtacccctcgtttcggtcgtctcgaagtttccatggcggggagctcgggttggaaaggatatgcctggggaggcccgccgaagagcaccggtaatatgttctgttgaccgttgttgatcgggctcgacgtgtattgcgatccgctgatctggctgtagtcgaccgaggggactcgggaatgtatttgagatgaaatgttggagatggtcgacccgtctgatgagcccgaaaacgatcgataagggtgagatacgactccctgtcggaacgatccaatgtggaattgttgcattggggcgagcgtgcggacgtagggattctgctcaggatcgacctcgagcaaagcgggttcgttgtcgtcctcccagtcttcatcgtcgtcatcgtcgctgagatcgtcctggacccggatgatcggctggagttgcttcgctgagtgagagatctttcgccgcttcgacggtgcagaggcggcgtgcatcgggcgagcgggttcgaagtcgagcttgataccggtgtatcgattgagactaggtgcttcctctcccacgatctgtaacaatggctacggcgtcagcttcatctcgcccaaggctactctatgatcttgcttacctcagttaaccagctgccgacagtacctctcgtcttgcccaacacgtaatcaatgacatccacgacctccttgatcaacgcctcatcggtcacctcgcccttgaagcacccgatcatcaactctctcatccgaagacgatctccttctgcccatttggtgcacaatgtgttccagccgcagcgacgtcggatgttgctgaaccagccgttgatgttggagagtggcatgttggtttgtgattgtattttgcggcggtcaggcatagaggggaaggggaagaggacgttgtggtacatccaagtacgaaggggacacgcgttcaggatattttgcgtaatatccatagttgattcgctctcgattaatgccagtcttttaactgaaacattaatggcttcagaagacatagattctccgagattcaagtcgagctcacttgtgcaggggtctgttgtccgagcgttgtcgacggcagactgttgctgaagttcgagcagcagctcctccgagctcaacatctgttgcgccacgatgttactattgcggcttatctcccctaatagtattctacagtcatctgtcactgcgaaatgagtccactttgattgcaacgtcacccatgcgtcacgcaatacgattcgagacgtatcggaatgtatggcgtccaacgtgagatgatggatcgagatgaggaattctcttagacttctgggcccgcttattttgtcgtttccagtcatttcagattatggacacctgttccagacgttgagatcttcaggatgttcgatctatagtcgaacagcagctgagctcgtactgtgggatacagtcagtatctgggcttgtaaattgatcattagatcgagcgtacttgctagttcatgatgaaacaaccagggatttgaccagtgtggacaaaagcgaatttcacttacagtccaccgatgtgactccctacgaaatcgaaacatgcagcctagagcgtcgtaacaaagcaagtcgccccagtcgcgagctcaaatttcatgatgtcagacgcttcgggagaacaaaagccgcggcgatgcacgcgttagcgcggcctggatgccgcaagtgattcatgaggtttaggatattagaatagcttcgacctcaaccatgcccgacacagaatggatttcctcacctgccatgtagcgactttacttcagcgattgttggccgtttgtcgataccttagttaccactagtatgcactgactgcagctcggcgttccgtataccgcattccagtcactcattagccatattcctaccgtctaacgtaactcttccccccaaacgccaggaccgacgaagcgattagcacatatcaacaagacattcggctttgaatcaagacgacgccgtaagggaaatttttcttcaagactgcggaattgcccggcgagcaaaatgtcggagtcaaggacagcctcatggcaaaagctcttagcgatcactcagggattgcagcagctggtcgtcgatagtaaccctagaaagatgtcgaccgatcatgccatcaagccctctttaccttccgcagacgacttgctgaaacggctgttctgtgcacacggtatcggtatctcagcattccagcaagagcagttccttcggatctgttcgaaactgaaggatcaagtcacggaattttaccattcaaacatcgccgaagctgattcgtcggaatatgttactggttatcaagatcgacaattccagttggactgcagtcaagctgtggagagatggtttgaccaagccttgaacgagatcatcgcggtatatgttccgtcacgagcgagaatggacagaacacaggttggtgcaaccatgtcctgtcgctcaactatttctgttactgatctagggctgttcagccgaaaggcaataagcaatccggctcacacatccaaatgttactcgacgcttttaaaatcaacaacacgccgaacgacaaggaacgggaggttttagcattggcaagcggactcacctataaacaggtatgccggttgagtcgaaacagttcgatggcagaagaaccacttagccatttctttcgataattcgtggactaggtcactacttgggtaaatctatgttgggaccccctaattctacgtttttgacccgcttcggtttttttatagtttcagaaccgacgacaaagagaaaaaggcaacacatctaggattgccaatggtgtcttagcttctcgcaagaagaagccgtcggcctcacgcatattccacgctactacatgtggccccatttcggccacctcctctacgaccaaatcggaaccactggacgccattgcggcttcaggtgcagtagttgatatgccaagtatcggctcagagaagcggattgctcgcctcgaaatcgagcgggaaatgaaattccgctccatattgcaaaacaaagacgcgctcaatcctggcagcgccgtggaatcaacacaaactgcaactgctcattcggatcaaacagagattttgaagtttggtatacctacgccctcctgcagtgacatcgaggcagaagcgcctcataatgattctgcccgcaagcaaaggccccttcgtggcctaccacagagacgacccggtaataaggtgactcgaaactcccgtatgccatcgtcatctttaggtcgaacaacgcgaggggttctcatacaaggagacgagatcatttccgatctcaagtcgaaacgacagctgagcggatctaggcttccccgtctctcgcgcagtgtttctaccgactcaacctctaccgaatgctatcagccatcggcgagtgaacagtctaaggtagatccagaagcgggctccgcccggcagagaaacatgaagggaggacctgtatcatcgaccagctgtacgggtaacgatcattcaagggatgggggtccctatgaacctacggaaatatcaacaaatgggctaatggaggcagccaagtcctatgcgccgcccgcgccccaacatctttccttttgtcatggatcaacacccgctaggccacttgcagactatttcccgaaagaagcagcataccgacctgtcttgggagacgaagtggacgcgatgccggttcaagggtatcgtgaagtccccgcagcaccgatgctgacagcgccgatgccaacagccgtgcaacccgatctcttccagctcatgacagacgcgatgggaaatcaatatattgttccggtgtcaaacgtcattcatctttcctcgcatcccaagtaccggtcatgcttgccttatcgagaagccggatattcctggcgcgaccaagatagcagcaacctgcgatccgcccttcccgccaccgagcacatctctagcacggaccgatctcataggcagaccactccattgccttcgggcgaaaaagaaactcgtctgtcaaccccagagagctcagttgaaatgaatccctcgccgtaccgttcaacacagatgcagaagaaaggcttgtcttccatggctgtcacgccagctgtcgccgaaactgccggcgcggacgctgaggagtaccgacagcaggcgaccgaagccatccttcccgccccgaaccacgagcaagcctgttcctcgaccttttcgtcttcagacgtcgatgtcatgtctcgaccccagctgggacccgtcccggacctgtcggtcgacggcgttcctttctcgttcgccgaactcgaagcgggcaacttcgtcctcgatgaagagacgctgcgagatatggaggcgctacttggaatggacggaagcgactccatcatcgattctaccattacgcctgaaagcaacacctcccagcttgaaacgaccgaagaaaagcagaacgaaggaaacaataccgacaacaaaaacgtccaacaaactgaaacgggagagatggggacaacattccccggctcggaggcgacggtcgaactggctttcgggcaggacggggctgtcggcttgacttatgcaagtgcccctggtcccgcccctggcgccatcccggcctttgcgctcgaacccgcacacgacgtgcatggtttcggctctgcggtcgggcctgactacactcagattcagacgtcggggctggtccctgctgagactccgagcttggcgtacacgacgaccgcagaggcggatcaagaatggaagactacaacgggatacgccaccgagcatcatgggacgatctaccccgcgactttaacgtcgacttctagctcggggtctgttgccgggtcgggcgagacggctttcccgccttacatctactataccgaaacaccgtacgcgcaacaacctcagtaccaagtccagccgtacatgcaggtgcctatgcaggtgcccatgcctattcagacgtcgatgcagatgcccatgtcgatgcaaatgcagacgcccttgacgacgatgccgctgcaaacgcctgaacccctcggaggctggaagtatgaatgggaatggggcgtcttgccctttgaggggatctcagcgggggagttgctcactttcacccagtagagactgacaaggcggcatgatgtgtggatggaggtatgtttgcggctcgagatcggctggttcggacggtccggggggggttagctgacaacttcgcgcacctgcttgattaggatgacgattgatgaacgatacgcgatattatggatggacacgctttttgatgagatatgattagtgcggcgaatttcctgaaccgctactcccgatgaggagatatatcccagtgttctgatgctttgtatgggctgttatccgacttgtagcggtgtggaccgcgatgaccgaaattgcgatatctctattaccatgtgaacctgacaacttttctcttcgttgtgacatttcgggcgagtcacattctcgtgagtggtgtcgtcacgggaacagggcaggctccagcgagcaacacacacacagagcaagtgtaaaaggttagaaaatgtcacaaccatccagcacaacacacatcaaccacctctagcttctcacatacaacccaaaacgcacaccacaaacatggccgaatccacctctgccgctaccgcccccttgccctccagcgccggcccttcatcgagcaccaagccttcccaagccttgtggctccgatgcgaaaagaaacctcacgagcaacgatgtgcattgacccccaacaccgccaaaacgttgatcgataacgggttcgagatctttgtggagaaggacaacgttaggtgttacgccgacgaggagtttgaggcgtgagtttcggggtcgacgtgttgctcgccaaggcagggaggtttgatggctgaacatttcttctttttttggctgaatggatcagtgtcgggtgcaagatggtccccaacaacgagtggtaccaggctcctctcgacgttcccatcttcggattgaaggagctcgaagagtccgagtgagtcgtagagactcctccccacctgatcccaccctctcatcaaaccccaactaattcccctccaacccctgacctcacagcgaacccctgcgtcacacccacatctcctttgcccacgtctacaaacaacaagccggctggcgcgacgtcctccgtcgattccgccgcggcaacggactcttgtacgacctcgaattcctcgccgacccctcctccggacgccgggtcgccgcgttcgggttccacgccggattcgcgggcgcagcggccggtgcgctggccttcgctagacagaaggaagacgccgggaagggagtcttgaagggtctcgaaccgtttgagaatgagcaggcgatgatcgggtatgtgaggaagcagatcgagagcctcggtgaagggggggtggggaacgtcagggcgttggtcgtcggtgccaacggaaggtgtgggagtggtgccgtagattgtttcaagaagatcgggttgaaggagtaagtcgagtcgagtggttcgaggtgatgtgtcaagggagggagagctgatctcgcacctggcgatagtgagaacattgtcaagtgggacatggccgagacctccaagggaggacctttccccgagatgctcgacggtgagtcccgcccgcagtctctacgtccctcctatagtactggtcgctgacgagctttctaccgtgatgcacggcagtcgacatctttgtcaactgcatctacttggccacccccattcccaagttcttgaccaccgactttatcgcccaggcgggtccggagaggaggttgagcgtcgtcgtcgacgtctcgtgcgagtgagtataggacgaccacccaccaggtacctgtaccggacctcgagctgatgtacgcaacgcgacccgtgccactcgatagcacgaccaaccctcacaaccctatccccatttacccccctgtcaacacttctttccccgagcctaccgtcgaggtcaaggtcggcgagggtaaccccaggatgaccgtcatcgccatcgaccacctgcccaccctcgtaagcatggtatcccgggtcatcgctccacctgccccaagctgacaatcagaccctacactactcgctccccatacagctccccagggaagcttcggaacagttctccaaggacctcatcccctcccttctacagctcccggagaggcagagcgccaaggtgtggaccaacgccgaggacctcttcaggaagaagatggccgaggccgaggaggaggacaagaaggagggcatcgaggcctagtgcccgagtgtccgggagatatctcggctgggtgcatacagtgtagcattcggcgtgtcgtggtcaaaaggggtgaaaatatgaaatacctggtttcaaatgccaatgtcccgaggaggacaagcttacagtgccgggtcgtgccatagaggattgaagccgtgtatcgaagtcgtgattggtgacagctggtggcggtcattctcttcactttgagcaagagacgattcgtgatcgtcttgattgatcgaaggtgaatgtcgtccatgcgaattgccctggcttcgtcaatctttcggtcacgacgacccttcacaaataatttccaaacattgactctgtaaggaaccgtctccgcctcgagaaaggcatcgctttcaggcgctccagtcttgtccagtcgaaagacgaaccagccacacttcttcggcgcatgagacgtcaccccgtttacgcatcagtcgaacgcctcatactggctgagagcatcgcaagcatgcctcctccgattgctctcagccatgcctcctgcgacttcggctaagggaagtgtaacattccgcgcttgtaaaaagcaacgctcaccttagaaggatatgaaggacaacgacgtatactggtcaaaaaaggagcatgagttcgctgcctattactggaagccagtcacggattctgttgactaattgactaacccgcaggccaatggagggctgaaactgttgggagacggagacaagctcgtaatcggcaaaccaggaccgaccgaatcagtcccgttcccggtactcgacaatgcaacctggctgtattcttactaacgagaagttgaggtcacgggattcttttgaggtacgcttcttccattccaacggttttgttcagcgacactcacctcaggccattattggatgacaatctgaaaatgatggcagaatcgctccgcgctccgcgagtatctcactgcgtgtgttgtagctccatcgtattttttcctgatccacaagtagggcatacgattccgcagctaccttggcacccagtagcgttgggtgacatttctctcttcctaggctaaactctgccactatcgcacgtttttcatcacggagcatcgcgatcggccgagactggccccattgttatctttcgcccctggcagttgttggacgatgaccacgtcaatgccggatctgactatgcccatattgtgccacatgatcggatcatgaagctggaacctgagtgaaccagagcataaaggattcaaggctgtcgcgaccaggccaacaatgatttccaatatcatcgaggtcatctgaaacagactcctcgacaagcttcctcatacttcccttgtttgctatatgatagtggattcaacagagacactttggccgtgatctcttgccctcacagattgataaccaggcttgcgtgctgaattattgggcaatcagtctattttcaatttagacgccatatttgcaatatgggttatgaaagacttcctttgataagcttcgccaggtgtggatggacgagtacggtctttgcctccccctagctccctcacgccttgcccatataacgaagcctaggcgtacccctgcgatcgcaatccaagccagggaactattcgaaaacttgcataatttacgttgaaatccttcaacggacgttcgtgatccaatcacaatttgacaaacaacatggtcccggagctctccactttgaatacgtctttcgtttcacttggcagtactgtcacctctgctgtaacgatcggctacaatgccgccgctagcactgctgctgctgcagttccgcgattgttgacggggagcgattctctcgggtccaacagtgttgagtatgacgaagctgtcaggcatgctgagaggacgaccggagtagaatccttgattgacacagacagccgatttaacggcaccgaaggccaaggacctgttgatgtgtcgatcaccggcaattccgctgtggattctcatgcaatgaggcccgccggtccacaggttcccgaacttgaatctgagcaaaatgtggttcgcgaggaggaaacactactgcacacgttccagatgaattcacttgagaagcgaaaagctgggggaggggggaccggagacctgtctcccgcggttagcggactcatagcggcgttgtgtatcgtcgtctgcttcagcgtggcgggagtgttcttttacaaagtggactgcaaaacggctcggcaaaccatttgtcgcgacatgcaggaccatctaaagcctttgtcgagtaggcttgagggcgagacagacgaggcatacatagcgagaattcaccgggaactctgtactgccgacaactacttgcaaaaattgctcgagggaaagaagatcaagtccgcgcgcctacagctccgggaggtacaggctgaaggagatactaatatagagttacaaggtccaagcgcctccgtatgaagatgtcatgataaagggcactccttactctcagagctcaaagatgcggtagctgacacacggaaagtcatcagtatcgacacgtagtctaggtattactcttgtattcatataatcagactggatcaggacattttatcgatgcacaagtattcgaacgaggatatagctcgctttcgggtgcagactttcgaacagacttctgtcatcccaaggatggctgtcatccgtacgggagtactcgtattccagtacaaggccgcgtgcacggcgaggtcccaggtgaaacggcgcgccttttcataaagcggagtttgacttgaggacttcgcggtgatcagtgatcagttatgcctcgaagtcatactttgaagtactgagggtgaacgtacagaccgcgttctcagagatcagggaagcctgtatccacgatattgtaacgccgatcaagggaatatgattatacgcttgccgatgccgctctcgaatcacagatataaggccatttgagttgcggctcgagctaatcgctagacatgttcgatttacattgacgtatcgcactcgcattcccgtacatagatatttcccgagctgaacctgaccatggcctcttctcttttgttcgcatcgaaacagccttcgagcgacagtctcctctatactatcgaagtcgacccctcgtcgacagcgctcagcggaacgcaaagtccttcaaccagtagtgcgatcaattctaggatcgagggtgacagcgtaaatacagagatttcaagcacgctcgaagactcagagctcggacctttcctcgctttgccgctcgatgaggaggaactggtcaacatcggggagagacttccgttgtataccactccctccgatatgttggaagacatgtcagaggccggcgtacccacaagtatcatcactggcgtccatgattacgtgaaaaggaaacaggagacgccggtaattggtccagtcggctgggtatatctaggcattgtaggcgcttgtgtcgttgcctttttcggagtcgctgccagggccaagctgttcgaccagcgccaacgtagccgcctccttggtcgttttccgagacgtttttggcgcgtcaaacctgcagctgttgcgcatccagaacgagacgtagagctaggacctcccggtggtcctcgggagcaagatggcgaagaacctagtgtcaccaggaccggtatcgatcaggtttgatcggattttcatgtcgaagatgacatgttcacgctgtgatatgacaaaggcggcactcaggctgaatcggattaggaagtacctgaaacagagtagttgatcgatcgtttggaaagtcaattacaagcgtgcttgatacgatcaccattatggttgaatatctggatggataccggtcgtgtttgcaacgccatcaacgtttgatgatatgctatttggtcatctgttcacgatagaccgactagtgcaggtgcagatcaatcgagtctgagtatgagaggaaaggcccaggaaatcacgcagggcaacccaaactcaaagcctcgtctgtatggtggaatatttcgctcaagctctgcatgcgtaaatccttcgctgacttcctgctcgcttgcgctctggcaatcatttgttatcgcggaactactgagtacctcacttgcgatgaaccgttgagagctccttgggtgctaaataactagatgtctgcacctggtgcgactgagacctgtctgttaacgagtactcatacgcgtcaagaagacgtagggtaagcttaaccggcgaatgatccaagataagacggtcggtaggcaaccccaaggcctttgatatactactactagtacttgattcgtctgctttgttcttggtattcccttgcaaatcgagccatctatcagattaaagaaggcgtcgcccagatgccgaaaactagtctagtcaatccggcttgtatactagtatatgcatattaccatccttcaggaagacgctggcgttgaactgacgtatcagcctccgccaagttgaaaccttgtcgttgatgagccatgtggatgaaaaagcgctctcctacccctatgtaatgcttcaaatccggttcgtaggcagagtgtcggcgggagagatgccaggaaggaatagtgtactcgctttggtgttgtgatgtcatcgtcatctacgccttgtaaatgggatcaccatccacgggcttcgacgacccgcagaccagcagatggcagtatagagagaccttaggacagcctttctcaccctcacgggaaatcggacgtgacagctcacctatagcattcgctcgtcctcttgacgtgggtgtctctttgcaactagcagctgataggtctgcactacttctctcgtaaagatacccatgaaataatgttcaaaaacctgtcacagaggagatcactgaatgggctttaagcggtacgaggattgccagttctgaccgcattgacttagacgatcacatggccagcgccgaagtcgcgtgatagtacgccaccgagatgtgtggcgctcctttgacggatcgcatcatcgtgatagtcgagcttctccatggctctcccggttagcatataagggggtcaacgaggaccctcttacactgactggaatgcctatcatttgctacttcgaatccatcggcaggcgatagtctcccgatttacatatctttgtcaccatgcctccaacgcccttatcgatctcctggttacagtctgcctctcccgcaagctcgatccaacctccgatatcgcgaggagaattcagcgcctttaccaatgctcccgagtccttggcagctccaggttctaaagcagaagggggtgacccataccaaaatactctcaacgagatcaacaatctttttcgtcccgaggacccagtcctcaccatcgatgttccagaagataccgtgttcacaaatgccgacagcagagtgagtgcggccgagaccattctcggcgatgctagtgaccagcaaactcccgaagccgaaggtgttcgaatgggtcaggcggagattgttttcaaatcggatcccgtccaactgacgagggctcagctggaccgatggaccgaacccgtggatcccagtactcttcccatggtggctggccttaacgaagggttggaagtgcccgagccagaggagatgcctcaaacgagattctggtgttgggtcgtagtgatctgcatgttgcctcccttggggcttctagcagggataaagatcggagcgctcttggaaagggatcctagccccgatcctgaaaaaggtggacatcagcgagcgcggcactctagattcaaccgacgaatcaaactgtggcctacgatcaacgaggaggaatgaggtaaagaacttgacgagctcacaaagggacttgatcaaggccgagatgggtcgatttgtacgcgttacgagtcttacatggtagtcgagggtcacaacggtgtgcccttgttcaacaaattcaaatcttcttgagcaagctagtctagaagtaagagaccttgaatatgtaacgataaggatgtagcgagtatagacgccaagcgggaatatgatcgacggcttccagctccgtcaatcatggtgacatagggttttggctgaattggtctgaaaatggcggtaccgctgcttaccggctactggctactgctcggtctcagtctactgctagcactccccgaactgccattactatcccgcctgagtattaataggtacacaagacggaatgagatatatcacgacgttccattcatatcggcgaatctaccctcgtatcacgtcaattgacctgccctgcggctagctgatagctagcgacgctgagaaatcacgaataaagattaccacaggtaggcttcggcggtctcggtactgagcggttgtcttccttttatgtatattagctcatctaatcactcaaagccgccaccatcaggtgtgatcatatgccgtcaaaatgattgagagatcgaaacacaatacatgaaacacattcctttcatgctagactccgcttctccgcctgagaagcttgtctgctggacgtttttccctatatatagtcgacccagaccttcgttcaggcttggaaataagctggagataaggcaacgacattgaagcgtactaccagatcaatttcaaccaaatcgtcctaaactacaatggctcccatcaactccctggccagctccgcttcgtttctgtcgcgaagggacggtgctccccacgtcggtgcatccctgaataccgacctcagcctgaacagcgctacacacaagatcgattcgtcccaagcgcctccgtctacgcccgtaatgagtctgtatcaggcgggtcaggaagccaccgaactcacaggcggggcgtctggacagactgacaactcgaaatcggatcaatcttccatgatgagcggattcgaaccgaccggttcttatgaccctagcgaggttggagctgcggaccccgctggtgatgaacaggaagccgaggcggtgtacgaaaggatctctcgggaggaaatcgatacgaacgttgaccctgaactcaacaagaagtacggggatgccctcaaggctagagcggaaaaggaacccggcgctcaattccacaaacgagacgaggatgagctctggtgttacacccgagccgacggaattttccgcctcgttatcgttccggtgtccttaaccgtcccgggggcaatagcgatctacgccattgtcatgcggcgtcgggacggaaagaagatggatctcattttgaaggccgaagaaagagcacacaacctaagtgtgacgagggacgcccgcttgatctcggcgctgaggacggacaatgagaggctaaccagggacaacgaattctggcgcacgtatttacaggagatgtcgagatcggacggaaatgaagatcgtgccgcgaacgccccgcaagatccgatggacccccccggtgcagaggggtctcctcaaagtcctgaccctgctctcatggaagtcggtgtcgacttggggacgtcgatgactggactgcgggaacttctgggtttggtgagagaccgacacgaggcgcagagacgagagagcgcgagggaggacgagtagggaactgaactgagctgacacgttttcttccgtgatatgtgtcgggctcgggatgtgaagaagcaagaaaaagttgtcagggagaagatgacgacagacaaaccagacactctactaggaggttcacgtatggtatatgaatggacattacaagagtagtagatgtagatatgactcgttccttgtgcttttggaatacatgttgtaacctcgtcatctatcaactcaagctacatacacgaatgcgccttgaaactcaaaggtcacaaacataagttcctacaacctaccattttggaatcgcccggaatatggacctagacgccgaaccttccccgcctacggccatccacctcccttcatccttgccctatccaatcactcttacttcggtcctcacacccgtctcctctcaagtcatcaaaggcaccaaagcgctatcgtacacttacactctaaaggacgatctcagggacggagcggatgtgaatacgacggatagtaaaaagagaaagggcgaggagaaggggtacgcgacctgggagatccctatcgatggagaagtcagcgaatgggcacaaggtgtcaaagtcgggacggtcatcaagaatgccaggtgagtttccgctttgaggtctcttggtcacgatctcagctgaaatgggaggtctcgaacgaatttgtagtcaaccgatcatttacatacagcaaccatgtgcccatcctgtacaattccacggcatgtgcgcgatctgcggagcagacttagcttcgtaagtcctcgtcccactctgaatcccaacccgaattatctcgagctggctcactgaccattctcttccactatacacgcgggtaacacaggcaggaatatactaccccggcaactagcaacaactcggcacggaataataacccgagtggcggtcccggtggctctgggagcggttcgggaggagtagagatcgaacataacgaaagtggcgttaaagtcagcttggaggtgagtcaatccagctcttctctgtttgtcgacctagacgctcgatttacccctattcgtcctgcaaacgcactcgcttgaactggatggccgatgacgtagaaagcccactcgatcgcactcgctcaacgcaagaacctcttgtccacacggaaactcatcctgattatcgacctggatcagacgatcatccagacggggtgcgacctgaccaccggtcgatggatggacgagtgttggggtccggaatggggattagtcaccgtggacaataaaggacgaggtgtacccagggaagatgggagaggcccacatgatgaggaccctcaggaaggggacaaggaaaaggaaggcaggaggaagaatagagaggggaacccgaatgccgatgcgatcaaggatatctggaggttcaggatggacgacgaggacgaggtcggggtggacgccatgggtaggaaatggacaagaaagggaagacaaggagtttggttttacgtcaaaccgaggtgagcctccgtttgcttaactcgatcgtcccaggctgggaagagagacactgatgccgtgcattccacttgggccatgacacgtagaccgggcttgcaagacttcctgaagaagatgtccgagatgtacgaactacacgtctacaccgccggaactcggacatacgccaacgccatctgtacctgtatcgacccgaccggcaagttcttctccgaacggatcttgagcaggaacgagagcggcagcgccagcacaaagagcttgaagaggttgttcccgacggacgagagcatggtcgtcgtcatcgacgatcggtgggaagtctgggcacatggaaagaacctggtcaaagtcattccatgtgagtagagaggttcgtagttttccgttgtaggcgattctgacccgggattgtattcttgccggtctagatgcgttctatcccaatacgggggatatcaactcggcctttgtcgagcctcgggcgactgacctgccgaccgggtctcaagccagcgcaacagcaatcccgagtgacaaggcggatgatcccgaattggagaagaagaagctgcaatccgaagccgctgcccgagaggttgagatccaggtagccgaagccccgctggcgaaacgtcaggaggagctcgatcgccaagaagccgagggcgggactgattcggcggaagatgtcaagatgctcgagggcaatgttgaggaaaggatgcatcatggacgtgctgcgctggtcgacaatgatcgagagttgaaaagggtcgacaaggtcttgaacgagattcacggcaggttctatcaggcttacgatcaaagcgataaacgggtctccttccgaccggcttcggaaccgaccaacagcattcctcacgatgttcgagtaagtcgttttgagatatagacgtgcaaaatccgcaaggttgacctgtgttttcgctcagcacatcatcccgcatatgagaagaaaggtcttgaatggttgcgtcatatgtttctccggtatcataccactgaaccagcatccagaagagtaggtagtgaacccgttcattcacagtaaagatcaagttaacccgttctcctgctttagtaacgaattctggttgctggcgagcatgtttggagcgcgatgtcaaaaggcgttggacaagcaggtgacacacctggtggcagctcaggcggacacgcaaaaggtcggccaggctctccgattacctagcaccaaggtcgtctggcgggagtggctgcgtttcagcgtcgatttctgcgttcggcaaccggaggaaccttaccagatcacctcgttcgggcgatcaggcgggtctccgccgcgtactccaagtcgcaagggcaaggagagggaaacgctcgagacggccgttatcacctcgcctcccacaccggacgctacggaacgtactcagctcgccacagtgtcggcaggcgattttgatgatatcgatgcggagctcgaagagttcatgggcagcgacgacgacgatgatgatgacgattcgatggagggatccgagagtggacgcagcaatcttaggtgagtcgaacaatcgaatattcgcggcgtgcctgtagccaaccgccccattctcgcatccacacagcgtgatggccagtccaacgagccgcaaacggccccgaaagacacatatggacgagaacgagacggcgcaagagcagtacgactcgagcacgtccgactctgaggacggaaagatggcacagttctcgccagagacggggatgacgaacgttggtccacccgtgacgaagcgtgcacgtcacaacgatgacgaaagggaagagcacgccaatcagtacgaagatgtgaccaaaggtcaggtggatgaggattgggacgaatatgtcgatgaagggaatgcgagcgaattggacgacaaggaagaatatgaagcaaaggattcgacagacgaagaggaggtcaacgacaaggaggtcactttggaaaaggtaagtcagcccgaatcgagataattactgaggcgtagctcaaatttttacctgtctcataggcatcgatgacataggccaggtgtcgccgacatcatagtaaaagcatgcctgaagcgtgatcacgctataatacactttgtgatctgtagcaaacagctttgctgcaatcatgcattattttcaacagcagagttgtagcttcatcactcgtcaccttgcctgtagtgcacgtgaccaagaccttgtgttatatgagagagtgcagcaggctgcagtctttgatagatgcatgtaacctggtcgtgcaggacaaggctgaatctttctacctatagcaacattgtccctcaatgcccgaccacaaagcgtcatcgctgccttcagaagatcatgacgtggactgggtgaattttctgaaataatttcgtacaatcatccggtttctaggcggtagtcacccagccgaagacatttttgacaataacggccgagctcaaggggcaccggcacaaatcggctgacatgaattgtccaacatgccgaagagcagcaaaatcagaaaattttggaattataagtcgaagcgaaacgaagtggtgtgtgtccgagcgtagcccgacaggtcgatcaggtcgaggagcgacgtagcaggtcgccgacgtagatggtccgcaatgtgctatagcgagtggacgatcaacttgagtttcggcagaaaggtggtacgaatggtaactcacgcatcgttcatggccagagcaagctgctcgccatcgggacgccatttggcatcgtaaatcggagaagcggtggagaagcgtttcttgagttgtccggtctatgtacgggacgatacggggaaggtttggtcttcgcatattgtgaaaaggcaagggcactctgagactcacctcggtgttccagatgttcaacatgccgtcctcggcgcaactcaggaacatgtcaccctcgggagaaaattcgagcgcgcgaatttcttcgcggtgctcgacgatggtatacaggcagtgatttccatccctggcgttaacatcgtacatcttgataacgtgacgatcgtccgagtcggattgagggtctgccatggacatgctgtaacgacattaggtgcgcaggtaagttggactggcgaagaaatagcaggtaacatcaggaatcaaactcacgtgacgagcagtcgctttccgtccttttgcagacgcgggcaccactggatcaactggatgtcatcgttgtgcccctcaagggtgagcaactccttgggttgtttctgaaggcccgaaagatgtcgtgatgagctgagaaacactgatgtctgtttatattcagggaactcacggcaggatccctaggttctgaaaagatgctagcaccttcttcctcaagcgcttgcatgtcccagatgcgaacggtgtgatcatcggagccactagccaaaagacggcgtgttccggtcgaaaagttgatcccagcaggcaacttgtcctcgggtcgatgtttgggtgagaatttgcagaccaagacacgatcctggtgtttgctcagggtagccagccggtcgacggcgttgacagagcaaatgacgatggtgtcatcttccgaacacgtggcaaagatttcgtcggtgagccagtcgacgtggtatgccttgtgaggcgcatggtgatcccagctgttcttgagcttgataggaacaacgctgatgtcccatacacaggtttgaccatcaatgttggtcgtggcaaagtagttgccgttgggattccaagcgacgcaagtgatttctcgaccgtggcggtagccggtaccctgcagctcaccgtcgccgacaaacgatcgtgcgacgttctccttgtcgactgtcatgtgaaagggttagcagcggtccggagcaggatcgtttagatgagaccgaaactcactcgtcacaaaggcgtttccgtcgttgttccaagcgaggtcgacgaccggatttttcgcctgtagcgccctgtggacaagctcgatcggtgttctcgccaataagcggaattgtcgatcttcagatgagagcgggtctgcgaaatcccaaatgttgcagagcccatcttgcgagcaggaaatgaggcgggtcaggttgagagggttccaggagactcgattgatctgtcgtaggacgtcgtaggggcgaaagtcagtctttgggaatctctcactctgagcaacgctaccatactgacctttttggtatgacctctccagcacaacatgccatctcgttcgactggctggagaggattcttttgtccggcaaagatggccttgatgttcgtgccggcgttcggtaccggtgtctgcgagacgctcctcgcctcttgcctctcgcccgacctctcgctcttggtattgttcgacacgttcgagttgcgcctcgctcggcccgtcttcttgttcggccgtttgctctcggcttcgctctcggtcaaggtcgattcagacacgatcctgctggtcttggcgggccgacctggacctggcccgatacccagcatttcgcgctccttgcgtccactttcgtgatcgccgttgacgagcttgcgctttttgggcacgaaatcgtcgtccctcgactttccccctcgatcgtcgtcccgcttcaacatggccagctttttctccttggtggtcccgttggaagcgaccggactggcgcgatccgtctcgtcacctttcttggtccgggcagcagcgacggtaccgttaggcaaaggcatgtccgtctcgtccgacgacaagacccgtttcttctttttcccataagtcggcggtgtctttacggccgtaggcgtcactgcggcaggtggctgagccagagtggttcgctgttggaccgtttccgtcaccggcttgtcccgctccctcggtcgatccttgtctcgatcccgttcgcgtcgctccttatcccgggacgtcgaggtggaaggaccattgacacggatgtcgggaatgtcatcgacgtcctcgacctgtcggcgtttcccatcacgaacccgaactctctccggtttttcccgggcatcttccaggtccacgtccatcgcctcgtcctccctctcatcctctacgcgttcgtgctcccgcctagacctggctgccgccatcgacgctcggcgagccagcttttcccgccttcgctcttcccgctcatgcctcaacttgcgcttctcctcggcccgtattcgtcggacgaacgaggcgtgcgattccctctcccccaagatcctctcgagtcggtctaattgactaccttcggccgcggggggaaaaacgtcttgtcgagcgagttgagcgcgttcttcctgggtgaggatgggagagtagatgggcgtgttggttttccggttgatgagaatgggcgggatgatcgggggttgaccgtagcgcggggccgccaaggtgcattcgtgatgcgtcaaaagggtgaatggggtgacgcatggtggggcctaggggtccatgtaacgcagggcaatcaatcagcttcacacggacacgatcttggtcgatccagaggctcacctcgttccagccgtattgggcatgcttctccacctcgtcccacattaaccccttgtaaagatgcctgatcaattcccctcgggggaccgccctgaacctctcctccctcgtccgcacacccgtgaccaccccagccgctgccccacctccaccagcagcagcaccgaccacggaccccgggccaggcgtagaagccgccgtcgtctgtcctctatccgaagccttcctcttcaacgccggcttcttcttcgacccttccgtcgtcgctgccgggacgtccgcttcgtccgccgtcgcagcaggatcaacatccatcctatccgcctcgtccaccgtgtcctccttttccttttccttgcccttgcccttgccagctttggccggcgtccctgatgaccccgcttccggtgcaggacccccgacggggaacctccccgggtgatcagggttcaagttggaaaagagcggagaatggtccaatttcgattccgagcggaacgtataggccgtatgcgggaaagacgattcgcagaggtactgttgccgtggtcggatgggtgtgtgtattgatcgtggtaattcgccagccagcggatggaatgtaggcggacggacgacatgatggtgacatgaccgaacccacggaaaaagcaaacaaaaggaccatcctcatcagcatcccactccccttgacatcccacgtcctctcaaaccacagtcctcgaacgactcaccgaatagatcaaaacgttcaactcgtcactcgagatcaatatcctcggcttatgttccttgtccttgccccgatcgagcaatcgacggcgttctcggtcgcgcaagagggtctcttcttgctcagcgcgggtcgcttgggggtcgggttcggcttgggctgcgagttcggggttggcagtgggattggcgttggggttggggttgagaggaggatctgacgaggtcgggttggggagaccatctccatctgacggtcgaccagttggagacccctgagtctgaacctgagcctgcggttgtcccaccgctcgacccccaaccccaactcccggagaacccgacccagggagcatcgaattgttcctccctggagtcgcgctcccactccgacccgcactcccacctgcgccgggggtgagggtgagggaagggccgacgttgccaagggtagggaccgggagtttggagctcgaggggatggcgttcgacatgatatgcgtgtcggtcgcggtttggccctagatgagggatgtgatatgtaggacggggacggatgttactgtaggtcgtaatcgcggtgaaaggtccgggtgggatgaccgagtagagttgtttcgcgttggggtgtctatttctatttcgatccctagtcccaacgtgttggtgataatggtggtaggtccaagttattcccagaaagaaagctggaacacccagagacaccgatgacggcgattaaagggagtccgagagcacgactcgacggtcgacgtattgctcgagtgaaaactctagatcgacagcctcgatcccactcgtcgtatctctttcctctcgacgtatcaccttggtaccctcttctccttctcgtcgttgtatggaaatcggcaccggaacgcggttcttgatttttttcttgcttctttcccgggccttaatatcccaaagaggtcaaagtcgagttcgaagacgtatataccacccaatcgacccgccgggcgcgatatgtagtggtatgtgatgggccgaacaaagacgatggccagcacgactcgggcgtgagatgtcttccccagagctagtgtgctgcccctcgagtacggcgtggtggttggtggttggtaaggagagtgtatagttgtagatgtagatggtagtttgtgtcgatttcccagtttcccgtctttcttgcccaaacgagcaagtcgacaaacgaaagaagaaccagagctgagactcgaaggggaccgaagtagaggtggtcatatacggggtcatattacggatcatttaggtcatgattctactatttgagctcacaggtcaatataatagacagctaggtatcacatgagctaaatatgttccaattctgatggttatatcgaccacaatcgctcgaaacaaatgacctctgactgtcaaaaacgcgtgtttaggtgaaagggcgacctgcgtcggcgagtgaattcaggaagacgagtcgatatcatcgattcaacttgcaaacgatatatgcactctataacaatccacatcttgtacagtcgcacaactagatagattcaaagctagctatatcgcgggcataccgtagcatacaatcctcacgccgccgtagaacgtgcacgcaccaccgactcgacgatgccacaatactctttcctcccctttctccaacctttccctataggcacccgcatcctcaccggcctcctcctctccctatccctcatccaagtcctcctcgtaggcctcgccgcaaggtcccgggatagtcagggaaggacgttcgatggcgccaacgagaacgccggggtaccctacctggtcgtcgtaccgggcaaagcggtcccttggtatgtttggacgttcttgaccgcagggttcgtcgagatcaagccgatcgaggtgagtccgctgcgtcaccccgggttgtcatgacgacgtccgtcctgtccatacaacaactcatacatactcatacacatcctccttcgtcaccccacccttgaaccccgtcatccaaataacgccggccgcagttcctcatctccctaatctccatccccctcctctcgcgatacctggaacgcgtctggggtcctaaagagctcctcaggttctcggccatcgtcatcatagcgagcaatatcatcgggtgggggatgtgttggggagagtttttgatggatcgacttgctctggcatgaatcctttccgtgcgacgtcttccagttcccgcaggtaatctatgacgccgaatatcatgagatcagcggcaaggtctacattgagacgcatagaagcgtgtggttcggactcgccatcgttccacccatcgacctcccaaaagctacccaaccttgcgcgaccggcgaggacacgacgaccttgttcatcatcgtcttcggcgtcgctccccaacgtcggttcccgttgagtgtccgagatttgtgattgtgacatttcgacgtcttccgtcgtcgtcgacgtggtggcggcggtgttttgagagtccatggtggtagggattggctgtctgatgtcgggtgtgtggcatgtatgtatgaatggatggagatggttgaatgatgatcgtcttttggatctcgcgagtctcgggaattgttccgaacaagggtaggggggtgatgcgaatgattgatattatgattattgacacgtcatagtcactgacaagatagatgacgtgtcctgtttgcaaccctttcttatcaaaataatcatcatccaccctcggcatctcccagccgcaactttcccgtaatcgctgcaaccgccgccgcccctctctgtgggatatttcaaaagagaaatggatgacattcagcaatcacatgtagtggtcagtagctgtagtagcaatctataacaacgacacgcacgccagtcaatccacctagacgaccatgaccatgacaagagctgcaggtcagctatccagcatcccccgaatgcgcctcgcgacctcgtccgggcgggtctgtctcgatggtaattctcgccatgacgtccccatcttgcaatcgcatacgatcgtcgttgactaacatctgatccttcttccagctcgactgttgaagcactcgtctatcgccgtcagatcgctcaactcgagctcgtcctcgatccccgctcgtatcccccgatcgacatgggccaagagacgttcgactgcgacgctaggatcatcgatctacggtcgttcccagcagcaacagcaacaacgagcgagcgagatcatccaactcgcagctcgacgatgggcttcatcctcatctccccagtcgacgtcgtctgccaacgccgaatcgatcaagacctcgtcgacgccttcaaaagacatttcgaccgagacgaaatccagcagtaccaccaccgccgccgccgtagacacccgtccgttcactcaacgagcctggtccaccgtgaaaaaggaagccgcgcattattgggcgggtaccaagctcctcgggagcgagatcaagattagcagcaagatcacctcgaaactcctcaagggtggaagcttgacccggcgggagaggcgtcaattacgacggacgacgaacgatctgttgaggttgatcccgttctcggtgtttttgatcgtaccgttcatggaactgttgttgcccgtggcgttgaagctgttccccaacatgctgcccagcacgttcgagggcaagctcgccgctgtgagtcccgatgagagggtcacctcgagcgtcgagccgctttgttttcaccgactgacgatcatcgatccatccatcatcgtttcaggacgagaaacaacgtaaagtcttgagggtcaggatcgagatggccaagtttttgcaagagaccatcagcgagagcggtctccgtgcggaaaaggtcgtcaacagcgacgagtttaaagagtttttccgcaaggttcgtccctcctccccggtcgtccgctcgaatatcggctcgcgcccagctgatcctcgggtctcgctcttctctctcttcctctcactcgaattggaaccgctggcggacaggtccgatccaccggagaaaaggcttcctcggaggacgtcatccgcgtggccaagctcttccaggatgacatcaccctggacaacttgtcccgccctcagcttgtcagcatgtgcaggtacatgaacatcaacgcctttgggacggacaactttttgaagcaccagatcagggcgaggttggaaaagatccgggtggacgacatggtacgtttcggtttgccgtggccgcgtgcgtgatcgaggctaatcggtgcgacatctgcgattacgaacagatgattcacgccgagggtatcgactcgctctcgactaaagagttgcaacaggcatgtcaatcccgaggtatccgaacgatcgggatctctccatcgcgattgcgggaagaactcggacaatggatcgagtttcattacaccagcaggatctcgggcgtcttgctcatcctgagcagagcgttccattatgatcaacaggaagagggcgtctttaggagtctggaggctactttgagcagtctgcccgacaacttggtgagtcgtctctttccccccgctcagaccttgtgaaacgagactcaacgtcacgtctccctgctcccccttttacagctgagcgaggccgagctcgacgtctcgggagaaaaggcctcgtacaaggaaaagctcgaggtattgcagcaacaacaagaactcatcgaggacgaggccgagcaagaacaggaagagaccgaggcgagggaacaggccaagagggagaagaaggagcgcgaggagagggagaggttgagcaggttggaagaggaggcaaggttggccaaggacatgttgcccggtggagaggtgagtcggcgggatctttccccgggggccgtctctgttgaaacgcacgggtcgactgatcatgcggatctttttgcgccctcgcagttgtcggaacctgccgctacggccgctgccgaaaaggacggaaggatgaccaaggaacagctcggcgagttggccgaggcattgtccatcttgtcggccaagtcgtcgatcgtcaaggagagggacgagctcaaacaattgatgtcggacaatatcgcttctgaagaggtaggttttgacgccgcctctcttgggacgtcaggaaatcttgctgacgatacccgggaacgttgcaggaatccaagctcaagccggtcgacaaggagaccccggaagtctcgctcaacaagcgtatccgaaagatgatcaagacgatcgacaaccagctcgagacgtacgacgaaaaggtcggatcgtcgctcaatacgattcagtgcaaccctcagggtcagatctcgttggacgacctgaagacggccatgcaggtcatcaagcacaagcccgacgacgagacgatcgaggccgtctgtcaaaagttggacgtcgatcaggacggtttcgtcgtgagtaggcgcggtggtatcatttcaaggcgagaccgaagctgaatacgagcgttgtttgtttgcatgctcgcaggtcctcgaccacgtcgtcgaattgactcaggatatgggtctcggaatcatcgtcgacgatcaggccaagaagattctcgacaagggcgccgagatcaaggataccaggcccaaaaaggaggacatcatctccgactagacgaagcccctttcccacctcacctatactcaaaatcattccatcatacacagctcatagatcctgtcaaattaaacgaacaattccttgttgtggcatctttcccggagaaaggggagaagatggttttgtagatgaacatgtatcgacgcatttgccttcattataggttacagcgtcgatcagcattggccgctaacgcatctgtcccagaccactaaactggcccagtgaccgatgtttccattgcgctgatcaccccttccaagcatctctgtgtgcagaacgacttccccgtgtagttgttggggacaacctgcacataagatagatgacattgtgcaacgagcattcactttcttccccccccccgcccgcccacgttatccatcacgggcgcgtcgcccgcgttcggtccggcgagagcgcggcaacggccggttgtcgaacatcgatcaacctgtcaactcgatggctatgctcaaaccgttgcttgattacgcagtcatgcaccacgttcaagtagtcctggcacaagtcacatcatgggaaactgcttctcggacccctcggctcccaagcaagccaagaagaacagcagcgggaacaacgccaacaaggggcacgtcctcgggtcggcaccgacgcaacccgctgcgaaccccgtcgtagccgtcccagccgggacctcgtcggcaccgctttcaccgaccattctatcaccaggaaggatcttgggtgatgggttcgaggatgcaaacaggggcaacgatgctcggtcgatggcagctgcagcagccgaggagaggatgaagagcgtgagtaggatcgatcagcttgagtcaacccgggtgtgtagggcggcggttgagggccttgcgggatctacaggccaacaaacgaggcgtacagaacggaggtggaaaactgaccgcaaagctggaagcggagagacgcaaaccattatactcgaacgacagccaggatcagccgatggtcagttcgttcgcgtcgggtatcgtgccaagaccaaacgctgatacacgtcttgcctcgcaggatctgaggaattacaattgatctgtgcacacgcaatcaaaggagcgaagtgaagatcgacacgcaaaaaaatagttgtaaatcattataccatgctactaccgttgtacgaccgtatgctctcgactcgctcaggccgtgcgttgtctggccactttcaccagtccccaccttcgtcgttcatcatgtccagatcacttctcaccacagccgtcctcgcccgttcagcctcgacctcttcctcggacagctcgatctttgtcttcttgtcccattcagggatcccgatcgataccgtcttgcattcgaggttgcgcgaggcaatgttgatcagggtgacgatgccagtctcggcgaatcgtggcaagagcacgattcgtgtgggtgagctcgagtctgcgaatgacacgaggcggcattgagttgtctgacgtagcccagacctatcgacatgaactcaccgccgaccaacgcagtacggaactcgggttggttcccccagaaatacacgttaggtcgtcgttcgatgatgaatgggtccttgtcagaaaaggggaagcaccctgtcatgaccccagagacgactgtcagcgatggacagcagcgctggtccgagcctttgactcacacaaggtatctggcgctgtgggcgcgacgtgtctccactcgagcgtccttctggccatcgatagccggtcgtctgaagggagatatttgtaaatgtcgtccaaagcctgtcctccagcacccaagaagctgtgagattacgatgcttttccaggtcagcacctgtcttgggagattcggcacacagccgagacgcacctcttgccccccagctcaaaccaacaaggattcgtctccatcgtcaacgccttgccgcctcccatcgccgcgtttctcagcattgatcgtgggaatggctgttgcggtagtgtcgatccgaccggatcatccggtccagggatcacatgtacaggcagaccagcggtaaggagatcggtaagcagagcatccagcgtgcttgtcgggtgtgcggtatacgtggaggagtcgtaaccgtatcgtttctgcagtacgtgagtcaggcaggcgcaagggttagctcggtgtacagtcaatcgagtcagttgtattcactggtttcctgtcgtcttcgtttcggatcggttgtgatagactgtttcccgcgagaatgatccgcccgaccttggcgccatctatctggtcctgtcacaaacgaatcggccgatatcagtctcggcagggcatcgatctcgctgcggcttgcagtctcacatcgactccgccaagctctcctgtgagccactctgatagcaactggcccttgaggtcctctggtacttcgctcgatcccgctgacagtcccgatatcaaggctacccattgaggttccccatcttgcacatccgccttgtcattccctgcatccatgtcgacgtcctcgtccggatcgacctgtttcgccttgcccttgcccttgttgatgttctgtttcgtatccgtctgcaatggcttcgcaggttttgcagagcttggagcggccaatggaggcagaccgccgaaacacaggtcaatgacttcaaagtctcccgaggcgttctccatcccgagacaggccgtgactacgcctagaccaggcggaggtacagacacatcagtctgatgtcgactttctctcggttcgcgagacgtacctgtaaccagccctccaccaggtcgctcgatctctttcgttagtcgcttccccacaagcgtgactcttcccgattcatcctcgagatgcacgacatcctcaggcgaaaagatctttttgcggggaggcggagctgcgatccagtgctggaaaatgtcgcagacattaacgaatgaaggtcgagcaggaacccctccctctttggctcacatccctacccatgtcctcgagtacgttaggtttgagcggcatctccatgtaaatcgttccgataatgtagcatagtttcgttcgctccacgttcagaatccgcttgagcagttttggcttgcctgttccacgctcagatgtgagcggtattcaattcgcaagagcgagctcaactaaccaggcgtccccgaccatctttccagcgctacctttgccacgatgggtcttaatttcaacagtcttgtaaagtatatgttggcatactgcgtcttgtagttccgggttgcaatgtcgttgagtacgaatgggtcattcagcgctgttaacggcttgtacgggatatgtgtacgggtggtgacgttgttcggcgcgatgtcatccagaaggtaatcatcgacggacattttggtgagactcgagctgtaaatcttggcgagaattgcgggatactcatgtcatgttgcggtaaatgtcccagttattggaaagctgggccaagctggccgacccggccaaacagaggagaacgcgatgcagctagtcggtgattcaattaaaatgggacgcgttacgcgatcgtgctattgcggtctggaaattacatatacattaaggagacagacattccttccatccagtctttactcgtctatcggctaggatactcccctttcatcgttcaacgatcgaccgggagagggcagggttcgattccctggtagagagatctttttgtgccccgcgcgatcgatataattttggttcctgaccctgactcataagcgagtgcatgctgacatgcagtgcgaaggtcgagataaagcaaagcacaatcgtgcgacatttccagaactactatggatgtccagcacgcttcgggattcagtagaaaattccaaggtgaacgaatgcagccgggagagcggcctgcgggccgtttgtcaactcagagcgcaaagcgagtgacgcgatgtgacgcaagtttcaatccaggaaacgacaaagcgacacgttgttactccaaagactaaaccaaagggcagtcggttgacaccgatcagatgatttacatgcttgaagccttatgtctatcttcacacgtgatcgtgatcgtaaatcatgagcaaaagcgtggtccatcggcgttgtcgtagcaaatacctgacgctctgtcgacacgtccctgatgaatctcacagtcgggtccttgtcaagttcttcttcaagctgtctgcatacggaattcatgaaaagattgatatacaactcgaaaacatcatgtaccaataatgcccgacactgatcaagaactggccggtacccctgcagggacacaaggcaatcgagaggaaacatcggtcagctcaatggatggcccaaacgcgagtcagaaacaattccagcactcacgtccggaaaagatgagctcgatcgccgcttcgacgttgccacccgtcatactcagtgccctcaagttttgctgaggatcgaccaaacccatctcgttcaaagtcctcaactggttcgaaaacctgtcctctaggctcctggtatcctggggcaaaggatcggcagcaggggtttgttgctgggcaccgccaccaaatccgccaaatcctcccatgccaccaagggcgccgagtccgccgaatccaccggctccaccggcacctccacccccgccacccatacccataagcattcgcatcatgtcggggttcatcccgaacggattggccgctccagctccttgaccaggagtacctgcagtcgcgctgtctccaccgttcgagggagtgttgttgccctctgcttgagcgccgaatccggcaacgagcgggttctgagctccggcacctcctgctcctccaaacggacttgctccccccatcccaccttgcatcgccatcatttgacgaatcatgttagggtcagacctgcgagatcagaatgatattcagcgatcgtcatgatggcgatatgcaagatcgccaaacacccacatcatttgcctcatcatagggctcctcatcatctccctgacctgaggtcccatcgagctgagcgaggggttcgaggcgatgatctgatcgatgaacacgtccgtccacccggtaccagtaggaggaacaccgatgggcagatagccagtggtgggtcggggggcaaggatcagggcaagagcgagcaagaggaaagtagtggggtccgggatgtcagccgtcattgtgggcgtgattgaaacaggcagtaagaccgaggttgatcatttcgacaggtggtggagatagccgaggaaatgcaaatgtggcgaagaggattcgaagaaaggatgtcaagcaagtgagagatgatgacaagatgagtttcagcgcagctacgtaacatgccgttggcttcggcactggactgacctggtccatcatctccggagtgatcatgctcatggcctgactgatagcctcggggttgttcagcatgttagccatctgccagataatacccaatcagctctggatcgtttcccatcatgcagatctcgaaacgctcgcgcggcttacagcattgggatcgttcaagttctgtccgtccatccctggcatctgggcgaaagggttgaaagtacccccgccgtacccgtgtcccatggcaccttccagctgagccaacgggtttccagcataaggcaacccagcgttcaggttggtcggcacacctcgagcttgagcggcagcggcggcgttggcattgttggaagaaggggacgaggccgggttcgaggtggatgcggctggggtgctaccgggcttggcggcccctttgacgaggtgcagcgagtgtccgttctggatcttgtaggtcgacaacggctcttcgtccttcaagacctgtagaaaacatcatggtgagatcaaaatacggcctctttcagagacgggccacgcgtgactgaccttgccagagtagatcaacctctgcctttcaggctcgatctgggtctgctcattgatcttggccttgagttccgacgtgaggagcgagggggagacggtcaacgagagcttgagctctgaaggccccttgatatttctgcaagtttcatcggcgttgtagacgacaaggaccgagaggacgagtgggaatgggacagtgcaagctgattgttagcgtcgggagatgatgatgtggccgcgcaagcattgagagatcttgagagaggacttacattgtgatttcctcggacatattgatcgataacgattagggactaattgctgggggattcaatcaccagatttcaattgaaactgatatacctattgagcgtcgtagttgtactgattgtccccctgtctatccctgcaagtccacgaccttcgagcaccgtcggccgcatcatcatcgatccgtgacgtttgaattggaggggaaagcggatccggatgggaattttgattagtcagcagtcagcagcccaacgtggcgcagcaggttagccgcagatcgttacttagaaaatctcaatgaaggttgcacatttacaagtcagtgaacgacagtcttcagctgtccgattgtctatccgcagatgtacaagcgttctgatcgggaatcccgactatcccatgacgggtcatgcctcgaactgatgctcgtgaacaatcgatgtaatcgtcgacaagcccgcagaccggtgatgagggtaaccccatgatgggttcacttgctctctttccatctgtggaagccgtcatgcacccacaacatatacgaaacattctccaggtatactatcaagccagatttacagagtcgcccattatacgagagctgaggcgccatgctcaagtagagacttgtaccagtgatccgggagtccacctttggcgagttccgagaggtgaagtgcctagtacaccagaattccatcccaaacacaagcgtccgaaaaaagtattctggtccaatggaagctccacgaagtcctcagctttcctgtgaagggaaaaggtgcaccgtcaggcgttcggggaagcttgtagttgtatttctcctcaaagtgggactgaatcgcgtgtagccgctcaaggttgttcgtggtattcatttggaaaggtcaaggaacatcgccttgtgatatcgcggccctcttgccattaccatacatagagccccaccagaatcagatgccgcttgtatcgttactcgctggaacgtcgaatcgttctatgggcgcgcgcacacgagcgcatggataccgcctgagctacagctagctcgtccatagtgatatcgagggtatattatcggtccagtaggcatggaaatagtataagttaagtcataacaaacagctggctctcatattcccaggactggctcggagagcaagccgagactttgactcctccgcgcaaatcgacacgtatagaaccctgtcctgataaaatagaacagatgcgagtgcattctctactttacgcagcgcccaagggtatacatgttggtctgtatgttttgaaggttatgcagagtgctctgatccgccacttagcctcgtacacacgtcccaaggcggtctttcgagctccgtattgaacggtcgcgcatcaacagattgaggtcagtgaatcgtaagagaacaggaggtcagtctgggatggcataggatatacatcgagcaacgtttgcaagagctggggccaaaaccggactttgttcttgtcttacgacccccttgtcgcattcaatcggacctgaccgctggacctcaagcagcaagcagcttgccactcggtcaaatgcgaaatcgattgtcacgacccacgccggcctcacccttcgcgtcggtatattctcggcatatctctcggcatcccccaacgcgctgcatgccccgcttgacaatcgcgttgcacctcattcgctcgatcgggatcactattaacatcatcatcgagtcgaaatgacaaccgtaccatctgtataactttctttacatgctcctgttcgagtgtcatactcaacaaacgtatcactcgacaacacctgcttacgatgtcgttcgtaccgcaagagacagatcctttgctggataacccggaccgaccgtcatcgactcagaacccacctcgaccgggtgacaatcgcgtctcgcgaactcgatcggcagagacgtccagcgagctcgattcggacgatgaaaggatgggtacttggggaatgagggagaagcgaggcaagacgaggatgatggtggacaacgtcggcttgggtagcatcgtcgtgagtagtgagattcggagcatcgtagattcgagtgcttacacgcacccctggcctgccacctcttgcctcgttcgtgttacagctcggtctgctcatgttcatgcccatggtccaatacctcgtactcgaagcctatcgaaaggacagcaaagggacaggctggtttgtcctgcaccccacgatgcagagtctggccatcaccatggccgtcatctgtaagtcttcgattcggcagtcgaggcatccctcgcgcgtgacagctaagcagctctcccgctacgtacgtcagccatccaatctttgcagacgacgacctctcccgccggatccgccgccaagcacgccgctttccgtcaacaccagatcatcaacctttcgttgtccttccccatcctcttgctcggcgtctcgtcgatcatctacaacaagcatttgcaccacgctcctcactttgtctcggctcacggcaagatgggcctcgccatcgtcgtctggctttttgtgcaaggtctgatcgggatcgtcgcttcgcaagccgccaagacgtatggcgatagtgcgagaaagttctacaagtaccaccgattatccgggtacctgttgttgcccctcgtcctcgtcactgcgcatctgggcggagcctactcggactggatggtcgggcatagccagctctggcagcgggtggtcgcgtttgacatcgggttggccatgatcggcgtcggcgttgtcatgcgtgcgaggtgagtcgtcggcggcgttcacaacagtcaaaggtgcaaagctgatagaaggttttcgactttgcaggcccagcaagatgaagtttttctaaagcgcgcatttcattcgacctttgtacaaatacatcgtggacatgacatgacattgatttttttcgactttgcaatacccgacctcgaccacgctcatggcatcgggctgacccgcttgagacccttttcgagagcgaccccgatagcaccagcggcgaggacgacccagctccatcgattcccgacctcttgaagcgagggccagaaactgttcttttccctcctccaaccttgcaattctgccaactttttcgtgtcccccttcttgtacctctcttcctgactagcctcgttctccttgtccccgccgacgaaacgcaagaatgcatagttggccaggggaccgatgagggagaacacgttcagggacgaagcggcgtacgcgagcagggggaacgaggcgtggacgagcgcgtcaccgaaatagttggggtgtcggacgatggaccaaacgccggatcgttgtagaccggtcgtcgtcgggtcgtctttatgggattcgagctggtaatcggccaggacttcgagggcgagacccgagctgaacagggcgacggcgaggttgtgtacgagatcggcgacggacgaagaggggggtgtgatgaagctcgttaccctcgctcccaaggggttcgacaaggggatgctccaggacaaggcgatcagggattgcgcgatggcttccatcccaaagacagagaacaaggccttgttccaccaactcgggtccgagttgaaatcggcgtatcgtgggtcatccccaccacgcctgagactcctactgacgattcggtagaacaacctcgtcccccagacggtcaccccgccgagcaagagttgttgcgtccagggcagggacttgagtacaatattgatcggtgtggtcgagttccatgctggacggagagcgtgaaaccaggcgttgaagacgagaccggtaggccagagccagtccttgagttcgacacggcgggttagacgacccacaccataggctccgagggaaagggcagcgtggatgccgagcgagggtgcgagggcgttgtggaggacgcccgtgttggtaaacgctgcggccagcgtcgagggtatcatgccaggcatgtcgatggttaagcagagagctgttcggtgacaggacttaggtgtcaaagtgcaaaggtgatgatgccatggtcatatcacttggtgatagcttatataacccgggtcggcgtgacctccacttgctcagctgctcacgagatgacgatgacgaaacacgatccaccctcgactttgttttaaccgatagacacgcgcgttcagggcgagagaggcagggtttcattgttgaaagccatatgccgagaatggcgtatatgaccaagcgcgcgctattccactgaaaggtcccgacacctagaagcgcacaacctctgttgtgatattgaatattcgtttcgatcgaccggcatcgtctcggaagttgatcattatccttgacatcaacccgagagaaagtcgaaatgtgagatcatcaacgaggtcaacctgagcttattatcagcaccttttcctttgattattaacacctgaatagaatctcagtcatgcgaggaacatctatgctccgccagacaatggcctcgtcgtcctcgagctccaagtttgcaccctccccgttggcccgattgatccgatcgcacatcatctcggccgacccttcgaccttgtccgccggaccgtcttccgcctcgacatcgacgtcgacatccactaccgaggcttcgcccgactccccgttcgttgccggtccgatccacttgaccatcgacaacccattcgcttcgcgtcgactctcccttcgcacgcaagccgacctcgttaaatccttccctccatcgtggctccctccttctcgcaagaacccctcgggatcccggacgatcgagtacgatcaggacggcgtcgtcgtccactggaccggtgggaacctgagcaagcagaagcaggtcgtcatccccaacaagcagccgagtgggatccggccgagcgacaaaaaggtcggggatttcaggggtagaaaggtggacagggtggccaaggaccgaagggctgagaccgaggcgaggttggaggggatggacaagcggatagaggattggaggcaggtgagtcggcgcttcgtttcggggtccgggtcgggctttgttggctgacgatatgtgcttggacaggcccgaaaggagaccaagcagaatgccaagccggcattgccgttctagacgacgacgtggacgttgtgatataccccttgatcatggtcgattcatggtttgaccacgactgcaatcaatcgtatcggtgccgatcgggcgagacgccgagtacgatcgctcggagattgcacccaggaggattgtcaaaatcgatcgtggccttccaccttgcacaactcggcgtaacgacattgcactacgcggacatttattttcgtcgtatatctgtgggatacaaaacgagggctgataatcgtaatagctgttcgtagtgacatgacattcggggtctcgggaagtgtacgtaaagttagtcgacaagggctggtaatcgtgaactgttcgtggatgagagtcgggggctcgggtcgtaaagctagaatcgcatcccggctacagcctttttttccttctgacctctcgcgctttgcgctcatcgtaccgcttgttctgtgtggctttcctcttttccattccgggtcatgcctatgatgtgcgcgatatgcccgtgcatatgcggccccgtatgcgggattcttctgtcgccatgactgttgataggaaagatgacaagcccgcctacgggccctgtaggtctcataagggacacggaatcgagccgaaatcccgttgacgccctccatgaggcagtaccgggaacatgtcccgcgccaggtatgagaggggacggttgtgaggtcgatctccttgatggttgcattgcgccgagccattccgtgagtaccgcctccgcgaacagcgaagagacacgcatatcgagtagcacagcatcatcgctgtcttcctggctgattgggtaggaccagagcaatccgaagcgcagcctcgtgtcgggattttgccgagagagcagctcgaagtttccaaaagtcaacttcctctgccggtctcgcttcttgctcgtgtcggctgcgaacgtggctttgtgttgggagactctacccgagatgccgacgtctccgtccccctccaaatttcctgtccctgtcccgctccccacgtacacgaggtggtcctcgccacgcaagtcctctccagtcttgaggcagcagccgaataatctcatctttggcacgatcgtatcgagctctaacaagtccttaaggttcagattgccttgcaagagtcggtacgtattctttggcagaccagcttcgaccttcctgttccacaattctcggtttttgagcgtcagaagactgtgccagaagccgctatacagtccaggcaaaaacgtaacgcgatgttgacgatttttggggcgaggcgcggtctcgatcatgacgcggacgtgcccgaatccattgcccccggcgctccaattatgtgacaactgctcatagatctcgtcgaatcgtttgtggaaggcctcgaagaacgggtcaccattccacgactactgataatataacgtgtgctcgcgatcgtcgttatgtgttgttggagagtcgtgttcgctattgggatgtatcgagttgttgtccgtcatacagggccaggcgaatccgttgtcgccgcaggatgcacatcgccgttcatcctgcgtcgtttgcttcgttcctcacaatcgattatcgccaactcacgacagctcgataagaatgtccccgctcaactatcctatagtctgcaaagtcctccagcactctactccagatcattgcttcggcagccgcggcttgagcccgcttcctcgccaaactctcgccaactgcttgatgtttgccggcaatcgtcatacgttcgatccaaatgtcttgtccattctgtctcttgcgtccaagcgtttcccaagtgagcgaatgaccccgttgggcgcattaactttgcaaatcagctctcgagctcttgagttctttccagccggtccagctgccctcggacacaggcaatatttcatgcgcttcttggtccagcggtccctgtggttcgtggagacttcgtttgccgggattggggccgagcggccggagtatcgctgccatattgaggggttcgagagcgctcgtggagggtctaggcaactgactggcctcgaaggcctccggtgatagtgcacgctgaaacgtgtgcactacaggtgctcctagtgtggatgtaacgggttccgtctgggcttcatcgatagacatcgaacccgcgaggtctggatcgacagaccaagtcggtggggtaatataagcccatatgagcgggggagtgttgtgctcacgatgtgtctgcggatgtgggacacggacgcacaaaccatgtcgtcaaagggatgtcttccaagcttcttgagaagcaacaccgacgatgattgcacagagttacggaagcaaaatatccacaaaatcaacaaaacgtaccagtaagctgctttcgcaccgcttgtcgccgaaacgacgcatcgccaccgtctcatctctgggtagctaggatgatagaatctaagatgatctatcacctatgatctattctctttctcctcttcgtctctgcagctagtccaccaaatcatgtcgcaccaatgaacatggctcccgcagagacgctcaccgagacaacgcgctgtggcgcttcgagtgaccacgacgaggtctcgaacggagtctcgacggcggtccctcctcctttgagcaacaagaatcatgtttgcaccagcaataagcgttgacatggtgaggcggatttcaagaacatgttggaggggatgggcctcgccaaatggcagactgtgaccgtacgtgatagtggaaaatcggcttgggagaggctaactatggcgataatgaagccacaacccaaggtcatcaaagagattcctctgaagcgacaactagaggccaggccgggacgcaaggtctggaatcccttcgacccgtacaaccacgacgagggattgaccaggcagtcatcggcatcgacgaaaaagaagcggaacaggggcgagaccgggcagtggggaacgaccgcaatctacaccctagccatcagagacaaaaatatcgcacccaagccggcacggtttcgaaagaggtttttggacatttacaaaaagttccgtcacctaccgtacacaatacatccgtaccaacaaaaatgatgtgacgagaagctcgcaggttgagagaaatataagaatggcaatcggttgctacgtatgttacaaccggtagagtgacgtagaaagttctcgcgcaggggcagacagcccgaccgcttgtgcaatcgacgtttacttcttcttctgggccttctcggcggccttggtaaccttaccggcctttccgctggtttgattaatgacgagtcgaaattagcaaaagcaaggaaaaattgaaggcaagaaaagacatactcagtcttctcgacggtcttgataacactgatgaagtaagaaggaatgaaacgagtacaagagtcagtaataatcaagtgaagcaatcaagtgaaaccgaattacccgacggcgacagtctgacgcatatccctgacggcgaatcgaccgaggggggggtactcctggtaagactcgacacacatgggcttggaggggacaagcttgacgatggcggcgtcaccagacttcaagaacttggggctggcctccatgacctttccggatcgcctgtcgatcttctcaatgagttcaccgaacttgcaggcaatgtgggcggtgtggcagtccaagacgggtgcgtatccggcaccgatctgaccggggtggttcaagacgatgacctgggcgttgaagctggcggcctccttggcagggtcgttcttggagtcggagcagacgtttcctcgcctgatgtccttgacggaaacgttcttgacgttgaatccgacgttgtcaccggggtgaccctcggggatctgctcgtggtgcatctcgacggacttgacttcggtggtcacgttggaaggagcaaagttgacaaccataccggccttgatgacaccagtctcgacacgaccgacgggaactgttccgataccaccctggcaggacgaacgacaggtgatggtcagccaatgtcacacgatggcaacaagggagcacaccggaactcacgatcttgtagacgtcctggagggggagtcggaggggcttgtccgagggtcggacagggggctcaatggcgtcgatggcctccaagagggtcttacccttggtggcaccggccttggtctccttgttccatcccttgtaccagggcatgttggaggactcctccaacatgttgtctccgtgccatccggagatggggacgaagggaacggacttggggttgtatccgaccttcttgatgaaaccggaggcctccttgacgatttcgtcgtatcggtcaccggaccactgcgagcgcgagaagagaaatggtcagcgacgcgtcatgacgaccacgaatgacccccgactgaccttgcaggtgtccatcttgttgatggcgacgatgagctgcctgacaccgagggtgaaggcgagcaaagcgtgctccctggtctggccatccttggagataccggcctcgaactcaccgatacccgaggcgatgatcaagatggcacaatcggcctgggaagtaccagtgatcatgttcttgataaagtctcggtgaccgggagcgtcaatgacggtgacattgtatcggggagtctcgaacttccagagggcaatgtcgatggtgatacctcgctcacgctcggccttaagtttgtcaaggaccctgtagaatggtggcatgcgcgaggtaggcgtcggttcgagacgacgatggcaacagagggaatctgttgtacttaccaagcgtacttgaacgaggactttccgagctcggcagcctccttctcgaacttctcgatggttcgcttgtcaattccaccacacttgtagatcaagtgctgaacagaggcaatggaaggatggtcagcgatactacacagtgtgtgtgatccttcgaaccgatgctcaactcactccggtggtggtcgactttccagagtcgacgtgtccgatgacaacgacgttaacgtgagtcttatctttacccatttttgaaaaagttgatctgtgatttgattcagagaaactcttgaaaggagaggggaaagagattcaggcaggttgatgaagagatgagtgttgtgggtgaggacgtggatgtttataggggaccgcgcgggtggagctgggtcgaggcgagaggtggcgaggaagaaaaaacttgatccaagccacgaaaggggtcaaggtgagggcagagacgagcgtgagaaagcgaaacgatgcctcgagccgggcaaaacgttcgtgagcgggtctagagggggccatgccagggccaagcgtacgcgtcgcctttacgcccgacgaacgttctagtcgataggcagtcttgactcaagcgcatttacgcgcttccagacgttaccctactccttttctcatacggtcactttgattccagccctctcatgggaaagcctcccacatcacgtgagatcgatttacgcttttggaacgctgctgtttgacgccggggaacgccccggccggggggggggacgagatcgccaaaagccatcatcgtcgcaagcacatccttcgccagcgctcgtccatcactgttcattggaatcccttctgtaacccgtgctgttcgaaccgctctccctgcctgcgacgatcgtacttctggtctagagcaaatggtagtccagccgatttctcggcctttcccctcagaggctcgttgaatgcgtcctttcagggtcgaacagggtcacacgacaatcaatgtcttgcatgccctcccctcagagtcccgcccataagtcctcctcaaagcacattcctcttcacttggatatccttcttatatccatctctcgtcctggcccagcccatcttgaccgacagacgaccgacctcgtccgctccaactcgcttactaaaatcccccccctcccgcgcccgcgaaacctcttcatgtgcgttccatacctcccccgccaggcaagcgatactacgaccccttcgaccccgcatactcggcaccccctaccccgggtaaaagcgtattgcgtccgacccaaagcagaccgtcggacgaggtatatcaacctgtcatctcttatcgtatctcgtcttcccgttcgttcgacttgtacgatcatcatcggctggtctctctatctctctggcctccggcctggaaagatcatcccgtgcgtcctgaaactcgacccgccggctttctcgagcttgccgacggggtctttcttttttctttggcttgacagtggacgcgtgcgaggaatggatggtcgtgtcgtgtcgtgtcgtgtcgagttgatatgacatgagcgcctacgatatgcgtgaaagtaacctcgcgggcgcgacgcaatgttttgattgttttgggggtaggggtcgatatcatgcgtaccactcgggcgggaccgtttccgaccttacttaccgtcgcacatgcacacgtcggcgcagcaggcgtgatcaccgccgaaactcgaggttatgggaccatgaaacgttgtttacgcggaacgttcctgacgaagatcagtggagtatttggctgcaccaagagctcgtttgcgatcgggtcggaagactaccctgtatgtaacgaaacgatggtggaggcgagtcacctgacattgcttcgtattattcgacgatctctgctgagcactcgtggctcttcaagagagccgcttgtgagtttgattcgtgtcatcgggatggtaattccagcgcttcagtcatcagtcaacctagaggtcaaggttggggaacctcaagaataggcgttcccacatcgaactcgtgacatcgattatagacgacgagtagcttgaccgttcgcttcccatcgtatgcgtttggattgcaagtcgttcgaagtcgcctttctggatcctccagagacgctgtacagtcatttaaggacctcagggacaggttgtgtcgatattatagacagacctatccacaaaccagtctcgtacatgagcatgcgggcatattgcatattaagcgcattctcgtttgttccaggatcgcgggcccatatgcaatgacgtgcgtgcgttgtgagccagcgtttcgaggccacttatagatacctcatgatttgatcgagatcactggtactgaacaatcacgctgagagagtcgatcactacgaggacgccagccggtaagaaaatcgccaagccctaagcgatcgaatctgacttggcccgtcgtcgtcatctttgccacccgacacatgaaaaggactgcaatgattctattgccacgagcgtgtactgtagccgctggtcatccttcaaacacccgatcactgaggcttgtcgagtcgcttctctagttggagggtcgactgactgccggacgatgctgtcaatccatcgcatcaaggcttctggccagatcgcttgcatttgaacgacgtaagtgcat
